(19) United States
(12) Patent Application Publication
(10) Pub. No.: US 2011/0053787 A1
(43) Pub. Date: Mar. 3, 2011

(54) Compositions and Methods of Detecting Post-Stop Peptides

(76) Inventors: Marie Brulliard, Nancy (FR); Bernard Bihain, Nancy (FR)

(21) Appl. No.: 12/863,057

(22) PCT Filed: Jan. 16, 2009
(86) PCT No.: PCT/IB09/00210

§ 371 Date: Oct. 26, 2010

(30) Foreign Application Priority Data
Jan. 18, 2008 (EP) 08300038.0

(51) Int. Cl. C40B 30/02; C07K 14/435; C07H 21/04; C07K 16/18; C12N 5/07; C07K 17/00; G01N 33/53; H01J 49/00

(52) U.S. Cl. 506/8; 530/350; 536/24.31; 530/387.9; 435/325; 530/391.1; 530/402; 436/501; 435/7.1; 250/282

(57) ABSTRACT

The present invention relates to novel methods and products for assessing the physiological status of a subject. More particularly, the invention relates to methods of assessing the presence, risk or stage of a cancer in a subject by identifying or measuring the levels of proteins that exhibits post-stop peptides in a sample from the subject. The invention is also suitable to assess the responsiveness of a subject to a treatment, as well as to screen candidate drugs and design novel therapies. The invention may be used in any mammalian subject, particularly in human subjects.

[0001] The present invention relates to novel methods and products for assessing the physiological status of a subject. More particularly, the invention relates to methods of assessing the presence, risk or stage of a cancer in a subject by identifying or measuring the levels of proteins that exhibits post-stop peptides in a sample from the subject. The invention is also suitable to assess the responsiveness of a subject to a treatment, as well as to screen candidate drugs and design novel therapies. The invention may be used in any mammalian subject, particularly in human subjects.

### INTRODUCTION

[0002] We have previously shown that expressed sequence tag (EST) libraries that correspond to human mRNA derived from cancer cells contain significantly more base substitutions than those from normal cells¹. This causes significant differences in mRNA heterogeneity isolated from normal and cancer cells from the same patient. The occurrence of base substitution in cancer mRNA is not random, but determined first by the nature of the substituted base and second by the composition of DNA context. Substitutions in cancer mRNA occur at sites that are 10⁴ more commonly encountered than those bearing somatic mutations^{1,2} and do not correspond to single nucleotide polymorphisms (SNP)^{1,3}. Further, >80% of base substitutions cannot be explained by known enzymatic base modification processes⁴. Considering the strong influence of DNA context that matches with the RNA Polymerase II (Pol II) active site⁵ and in vitro evidence demonstrating forward slipping of Pol II in specific DNA contexts^{6,7}, we proposed that nonrandom transcription infidelity (TI) events are responsible for the fact that a small fraction (2 to 10%) of cancer mRNA encoding a given transcript are not completely faithful copies of genomic DNA.

[0003] We have now expanded this first analysis to the whole genome and all available human transcripts. By conducting this extended analysis, we have shown that base substitutions occurring in natural stop codons as a result of transcription infidelity create novel coding regions that encode specific amino acid sequences (AA). These novel AA sequences, located at the carboxy-terminal end of proteins, which we call post-stop peptides, represent highly valuable products for the design of therapeutic or diagnostic methods and compositions.

### SUMMARY OF THE INVENTION

[0004] An object of this invention therefore relates to polypeptides comprising the sequence of a post-stop peptide created by transcription infidelity in a stop codon. In a preferred embodiment, the polypeptides of this invention comprise the sequence of a post-stop peptide of a human protein, preferably a secreted, plasmatic or membrane protein. In a particular embodiment, the polypeptide of this invention comprises a sequence selected from SEQ ID NOs: 1 to 1596 or an epitope-containing fragment thereof. In a particular embodiment, the polypeptide of this invention comprises the sequence located on the C-terminal side of the X residue in any one of SEQ ID NOs: 1 to 1596, or of an epitope-containing fragment thereof.

[0005] Another object of this invention relates to a polynucleotide encoding a polypeptide as defined above, or a complementary strand thereof.

[0006] The invention also relates to a vector comprising a polynucleotide as defined above, as well as to recombinant host cells comprising such a vector or polynucleotide.

[0007] A further object of this invention is an isolated immune cell comprising a TCR specific for a post-stop peptide as defined above. Such a cell is preferably a mammalian cell, typically a human cell, and may include B cells, dendritic cells or T cells.

[0008] The invention also relates to a device or product comprising, immobilized on a support, at least one polypeptide or polynucleotide as defined above.

[0009] The invention also relates to an antibody that specifically binds a polypeptide as defined above. The antibody may be monoclonal or polyclonal. The term antibody also designates antibody fragments or derivatives, such as Fab, CDR, Single chain antibodies, humanized antibodies, etc.

[0010] A further object of this invention is a composition comprising a polypeptide, polynucleotide, antibody or immune cell as defined above, and a suitable excipient or vehicle.

[0011] Another object of this invention relates to a method for detecting the presence, risk or stage of development of a cancer in a subject, the method comprising a step of measuring the presence or level of a protein that exhibits a post-stop peptide in the subject or in a sample from the subject, wherein the presence or level of such protein that exhibits a post-stop peptide is an indication of the presence, risk or stage of development of a cancer.

[0012] In a preferred embodiment, the method comprises detecting simultaneously within the sample several proteins that exhibits post-stop peptides created by transcription infidelity, preferably from 2 to 100, 2 to 50 or from 2 to 10. In a further preferred embodiment, the protein comprises at least a post-stop peptide sequence as contained in the sequences selected from SEQ ID NOs: 1 to 1596, or an epitope-containing fragment thereof.

[0013] A further object of this invention relates to a method for detecting post-stop peptides by tandem mass spectrometry, the method comprising creating spectral libraries or fragmentation pattern databases specific of post-stop peptides and running software programs or algorithms to search or compare such databases or libraries with the output of MS/MS experiments.

[0014] A further object of this invention relates to a method for detecting the presence, risk or stage of development of a cancer in a subject, the method comprising contacting in vitro a sample from the subject with a polypeptide comprising the sequence of a post-stop peptide domain created by transcription infidelity and determining whether the sample contains any antibody or TCR-bearing cell that binds to said peptide, wherein the presence of such antibody or cell is an indication of the presence, risk or stage of development of a cancer.

[0015] In a preferred embodiment, the method comprises contacting simultaneously with the sample several polypeptides comprising the sequence of a post-stop peptide created by transcription infidelity, preferably from 2 to 100, 2 to 50 or from 2 to 10. In a further preferred embodiment, the polypeptide comprises a post-stop peptide sequence as contained in a selected from SEQ ID NOs: 1 to 1596, or an epitope-containing fragment thereof.

[0016] Also, in a specific embodiment, the polypeptide(s) is (are) immobilized on a support.

[0017] A further object of this invention relates to a method of assessing the physiological status of a subject, the method comprising a step of measuring the presence or level of a protein that exhibits a post-stop peptide in a sample from the subject and comparing said level to a reference level, wherein a deviation as compared to said reference level is an indication of a physiological disorder. The reference level may be e.g., a pre-determined mean or median value, a control value determined from a control sample, or a value determined at an earlier stage in a sample from the subject.

[0018] A further object of this invention relates to a method of assessing the physiological status of a subject, the method comprising a step of measuring the presence or level of antibodies specific for a post-stop peptide or of TCR-bearing immune cells that bind to such post-stop peptide in a sample from the subject, wherein a modified level of said antibodies or immune cells in said sample as compared to a reference level is an indication of a physiological disorder.

[0019] A further object of this invention relates to a method of direct detection of a protein that exhibits a post-stop peptide in a sample from the subject, the method comprising treating the sample to improve availability of the protein and detecting the protein by mass spectrometry. The sample is typically blood or a sub-fraction thereof. The sample is typically treated by lysis and/or dilution and/or fractioning and/or concentration and/or dialysis.

[0020] An other object of this invention resides in a method of producing a post-stop peptide specific for transcription infidelity, the method comprising:

[0021] identifying a post-stop peptide sequence resulting from base substitution because of transcription infidelity in a natural stop codon;

[0022] synthesizing said post-stop peptide.

[0023] A further object of this invention is a method a producing a polypeptide of this invention, the method comprising expressing a polynucleotide of this invention and recovering the polypeptide. Expression may be obtained e.g. in an acellular system, or in a cell cultured in vitro.

[0024] A further object of this invention is a method of producing an antibody, the method comprising immunizing a non-human animal with a polypeptide of this invention and recovering antibodies or antibody-producing cells from said animal. The antibody may be polyclonal or monoclonal, and may be subsequently modified to produce fragments thereof (e.g., Fab, CDR, etc) or derivatives thereof (e.g., Single chain antibodies, humanized antibodies, bi-functional antibodies, etc.) retaining at least substantially the same antigen specificity.

[0025] A further object of this invention is a method of selecting, optimizing or producing a drug candidate, the method comprising a step of determining whether a candidate compound modifies expression of a protein that exhibits a post-stop peptide. According to the target purpose, the candidate compound that increases or decreases said expression is selected. Alternatively, candidate compounds which do not affect said expression may also be selected.

### LEGEND TO THE FIGURES

[0026] FIG. 1. Principle of cDNA library construction and sequencing.

[0027] FIG. 2. Results of bioinformatics and statistical analysis.

[0028] FIG. 3. Results of C>N substitutions occurring within stop codon. FIG. 3 presents C>N positions occurring within stop codon. RefSeq identifier and position on RefSeq are shown in the first column. The number of cancer and normal ESTs having A, T, C or G are also given.

### DETAILED DESCRIPTION OF THE INVENTION

[0029] The present invention relates to novel products and their uses in the medical area, e.g., for assessing the physiological status of a subject. More particularly, the invention relates to methods of assessing the presence, risk or stage of a cancer in a subject by measuring the presence or level of proteins that exhibits post-stop peptides in a sample from the subject. The invention is also suitable to assess the responsiveness of a subject to a treatment, as well as to screen or design candidate drugs.

[0030] Transcription infidelity designates a novel mechanism by which several distinct RNA molecules are produced in a cell from a single gene sequence. This newly identified mechanism potentially affects any gene, is non-random, and follows particular rules, as disclosed in co-pending application no PCT/EP07/057,541, the disclosure of which is incorporated herein in its entirety.

[0031] The present application shows that transcription infidelity introduces base substitutions in natural stop codons of RNA molecules, thereby creating novel coding regions that encode novel AA sequences at the carboxy-terminal end of proteins called post-stop peptides. These post-stop peptide sequences are long enough to contain epitopes against which antibodies may be generated by mammalians. As a result, the expression of proteins that exhibits post-stop peptides in a subject can be assessed by measuring the presence of corresponding antibodies or TCR-bearing cells in a sample from the subject.

[0032] The present invention now provides a method for predicting and/or identifying the sequence of post-stop peptides generated by transcription infidelity events from any gene, as well as methods of producing post-stop peptides. The invention also discloses more than 1,500 post-stop peptides.

[0033] In a first embodiment, the present invention is drawn to an isolated polypeptide comprising a post-stop peptide, i.e., a novel sequence of an aberrant protein domain created by a base substitution in a natural stop codon because of transcription infidelity. Specific examples of polypeptides of this invention comprise a sequence selected from SEQ ID NOs: 1 to 1596, or an epitope containing fragment thereof.

[0034] The term “epitope-containing fragment” denotes any fragment containing at least 3 consecutive amino acid residues, preferably at least 5, 6, 7 or 8 consecutive amino acid residues, which form an immunologic epitope for antibodies or TCR-expressing cells. Such an epitope may be linear or conformational, and specific for B- or T-cells.

[0035] Within the context of this invention, the term “isolated”, when referring to a polypeptide, means the polypeptide is not in a naturally occurring medium (e.g., it is at least partially purified, or present e.g., in a synthetic medium).

[0036] The sequences as depicted in SEQ ID Nos. 1-1596 have the following general structure: native protein-X-PSP peptide. Accordingly, the amino acid sequences located on the C-terminal side of the X residue represent PSP peptides of this invention. In a specific embodiment, a polypeptide of this invention comprises the sequence of a PSP peptide as contained in any one of SEQ ID NOs: 1 to 1596, or of an epitope-containing fragment thereof, i.e., the sequence located on the C-terminal side of the X residue in any one of SEQ ID NOs: 1 to 1596, or an epitope-containing fragment thereof.

[0037] A post-stop peptide sequence of this invention typically comprises between 3 and 100 amino acids, preferably between 3 and 50, more preferably between 3 and 30 amino acids. The post-stop peptides of this invention may be produced by any conventional technique, such as artificial polypeptide synthesis or recombinant technology.

[0038] Post-stop peptides of this invention may optionally comprise additional residues or functions, such as, without limitation, additional amino acid residues, chemical or biological groups, including labels, tags, stabilizer, targeting moieties, purification tags, secretory peptides, functionalizing reactive groups, etc. Such additional residues or functions may be chemically derivatized, added as an amino acid sequence region of a fusion protein, complexed with or otherwise either covalently or non-covalently attached. They may also contain natural or non-natural amino acids. The post-stop peptide may be in soluble form, or attached to (or complexed with or embedded in) a support, such as a matrix, a column, a bead, a plate, a membrane, a slide, a cell, a lipid, a well, etc.

[0039] The post-stop peptides of this invention may be present as monomers, or as multimers. Also, they may be in linear conformation, or in particular spatial conformation. In this respect, the post-stop peptides may be included in particular scaffold to display specific configuration.

[0040] Post stop peptides of the present invention may be used as immunogens in vaccine compositions or to produce specific antibodies. They may also by used to target drugs or other molecules (e.g., labels) to specific sites within an organism. They may also be used as specific reagents to detect or dose specific antibodies or TCR-bearing immune cells from any sample.

[0041] In this respect, a particular object of this invention resides in a device or product comprising a post-stop peptide as defined above attached to a solid support. The attachment is preferably a terminal attachment, thereby maintaining the post-stop peptide in a suitable conformation to allow binding of a specific antibody when contacted with a sample containing the same. The attachment may be covalent or non-covalent, directly to the support or through a spacer group. Various techniques have been reported in the art to immobilize a peptide on a support (polymers, ceramic, plastic, glass, silica, etc.), as disclosed for instance in Hall et al., Mechanisms of ageing and development 128 (2007) 161. The support may be magnetic, such as magnetic beads, to facilitate e.g., separation.

[0042] The device preferably comprises a plurality of post-stop peptides of this invention, e.g., arrayed in a pre-defined order, so that several antibodies may be detected or measured with the same device.

[0043] The device is typically made of any solid or semi-solid support, such as a titration plate, dish, slide, wells, membrane, bead, column, etc. The support preferably comprises at least two polypeptides comprising a PSP sequence as contained in any one of SEQ ID NO: 1 to 1596, more preferably from 2 to 10.

[0044] The support may comprise additional objects or biological elements, such as control polypeptides and/or polypeptides having a different immune reactivity.

[0045] Formation of an immune complex between the post-stop peptide and an antibody may be assessed by known techniques, such as by using a second labelled antibody specific for human antibodies, or by competition reactions, etc.

[0046] A further aspect of this invention resides in a kit comprising a device as disclosed above, as well as a reagent to perform an immune reaction.

[0047] A further aspect of this invention relates to a polynucleotide comprising a nucleotide sequence encoding a polypeptide as defined above, or a complementary strand thereof. Particularly, this polynucleotide comprises a first nucleotide sequence encoding a polypeptide comprising a PSP sequence as contained in any one of SEQ ID NOs: 1-1596 or a sequence complementary thereto, and a second nucleotide sequence of 100 or less nucleotides in length, wherein said second nucleotide sequence is adjacent to said first nucleotide sequence in a naturally occurring nucleic acid. The length of the second nucleotide sequence which is adjacent to the first nucleotide sequence may be, for example, 75, 50, 25, 10 or 0.

[0048] In a specific embodiment, the invention relates to a polynucleotide consisting of a nucleic acid sequence encoding a polypeptide as defined above.

[0049] The polynucleotides of the present invention may be DNA or RNA, such as complementary DNA, synthetic DNA, mRNA, or analogs of these containing, for example, modified nucleotides such as 3′alkoxyribonucleotides, methylphosphanates, and the like, and peptide nucleic acids (PNAs), etc. The polynucleotide may be labelled. The polynucleotide may be produced according to techniques well-known per se in the art, such as by chemical synthetic methods, in vitro transcription, or through recombinant DNA methodologies, using sequence information contained in the present application. In particular, the polynucleotide may be produced by chemical oligonucleotide synthesis, library screening, amplification, ligation, recombinant techniques, and combination(s) thereof.

[0050] Polynucleotides of this invention may comprise additional regulatory nucleotide sequences, such as e.g., promoters, enhancers, silencers, terminators, and the like that can be used to cause or regulate expression of a polypeptide.

[0051] Polynucleotides of this invention may be used to produce a recombinant polypeptide of this invention. They may also be used to design specific reagents such as primers, probes or antisense molecules (including antisense RNA, iRNA, aptamers, ribozymes, etc.), that specifically detect, bind or affect expression of a polynucleotide encoding a polypeptide as defined above. They may also be used as therapeutic molecules (e.g., as part of an engineered virus, such as, without limitation, an engineered adenovirus or adeno-associated virus vector in gene therapy programs) or to generate recombinant cells or genetically modified non-human animals, which are useful, for instance, in screening compound libraries for agents that modulate the activity of a polypeptide as defined above.

[0052] Within the context of this invention, a nucleic acid “probe” refers to a nucleic acid or oligonucleotide having a nucleotide sequence which is capable of selective hybridization with a polynucleotide of this invention or a complement thereof, and which is suitable for detecting the presence (or amount) thereof in a sample. Probes are preferably perfectly complementary to a transcription infidelity domain. However, certain mismatch may be tolerated. Probes typically comprise single-stranded nucleic acids of between 8 to 1500 nucleotides in length, for instance between 10 and 1000, more preferably between 10 and 800, typically between 20 and 400, even more preferably below 200. A preferred probe of this invention is a single stranded nucleic acid molecule of between 8 to 200 nucleotides in length, which can specifically hybridize to a transcription infidelity domain.

[0053] The term “primer” designates a nucleic acid or oligonucleotide having a nucleotide sequence which is capable of selective hybridization with a polynucleotide of this invention or a complement thereof, or with a region of a nucleic acid that flanks a transcription infidelity domain in a broader, naturally-occurring molecule, and which is suitable for amplifying all or a portion of said transcription infidelity domain in a sample containing the same. Typical primers of this invention are single-stranded nucleic acid molecules of about 5 to 60 nucleotides in length, more preferably of about 8 to about 50 nucleotides in length, further preferably of about 10 to 40, 35, 30 or 25 nucleotides in length. Perfect complementarity is preferred, to ensure high specificity. However, certain mismatch may be tolerated, as discussed above for probes.

[0054] Another aspect of this invention resides in a vector, such as an expression or cloning vector comprising a polynucleotide as defined above. Such vectors may be selected from plasmids, recombinant viruses, phages, episomes, artificial chromosomes, and the like. Many such vectors are commercially available and may be produced according to recombinant techniques well known in the art, such as the methods set forth in manuals such as Sambrook et al., Molecular Cloning (2d ed. Cold Spring Harbor Press 1989), which is hereby incorporated by reference herein in its entirety.

[0055] A further aspect of this invention resides in a host cell transformed or transfected with a polynucleotide or a vector as defined above. The host cell may be any cell that can be genetically modified and, preferably, cultivated. The cell can be eukaryotic or prokaryotic, such as a mammalian cell, an insect cell, a plant cell, a yeast, a fungus, a bacterial cell, etc. Typical examples include mammalian primary or established cells (3T3, CHO, Vero, Hela, etc.), as well as yeast cells (e.g., Saccharomyces species, Kluyveromyces, etc.) and bacteria (e.g., E. Coli). It should be understood that the invention is not limited with respect to any particular cell type, and can be applied to all kinds of cells, following common general knowledge.

[0056] The present invention allows the performance of detection or diagnostic assays that can be used, e.g., to detect the presence, absence, predisposition, risk or severity of a disease from a sample derived from a subject. In a particular embodiment, the disease is a cancer. The term “diagnostics” shall be construed as including methods of pharmacogenomics, prognostic, and so forth.

[0057] In a particular aspect, the invention relates to a method of detecting in vitro or ex vivo the presence, absence, predisposition, risk or severity of a disease in a subject, preferably a human subject, comprising placing a sample from the subject in contact with a polypeptide as defined above and determining the formation of an immune complex. Most preferably, the polypeptide is immobilized on a support. In a preferred embodiment, the method comprises contacting the sample with a device as disclosed above and determining the formation of immune complexes. Preferably, the polypeptide comprises a PSP sequence as contained in any one of SEQ ID NOs: 1-1596, or an epitope-containing fragment thereof.

[0058] In another aspect, the invention relates to a method of detecting in vitro or ex vivo the presence, absence, predisposition, risk or severity of a disease in a subject, preferably a human subject, comprising placing a sample from the subject in contact with an antibody that binds a polypeptide as defined above, and determining the formation of an immune complex. The antibody may be immobilized on a support. In a preferred embodiment, the method comprises contacting the sample with a device as disclosed above and determining the formation of immune complexes. In another preferred embodiment, the antibody is specific for a polypeptide comprising a PSP sequence as contained in any one of SEQ ID NOs: 1-1596.

[0059] In another aspect, the invention relates to a method of detecting in vitro or ex vivo the presence, absence, predisposition, risk or severity of a disease in a subject, preferably a human subject, comprising detecting a polypeptide as defined above by mass spectrometry, most preferably tandem mass spectrometry. In a preferred embodiment the method comprises creating spectra or fragmentation patterns specific of a polypeptide as defined above and running software programs or algorithms to search or compare such spectra or fragmentation patterns with the output of MS/MS experiments. In another preferred embodiment, the spectra or fragmentation patterns are specifically created for a polypeptide comprising a PSP sequence as contained in any one of SEQ ID NOs: 1-1596.

[0060] A particular object of this invention resides in a method of detecting the presence, absence, predisposition, risk or severity of cancers in a subject, the method comprising placing in vitro or ex vivo a sample from the subject in contact with a polypeptide as defined above and determining the formation of an immune complex. More preferably, the polypeptide is immobilized on a support and comprises a PSP sequence as contained in any one of SEQ ID NOs: 1-1596.

[0061] Another object of this invention resides in a method of detecting the presence, absence, predisposition, risk or severity of cancers in a subject, the method comprising placing a sample from the subject in contact with an antibody that binds a polypeptide as defined above, and determining the formation of an immune complex. The antibody may be immobilized on a support. In a preferred embodiment, the antibody is specific for a polypeptide comprising a PSP sequence as contained in any one of SEQ ID NOs: 1-1596.

[0062] Another object of this invention resides in a method of detecting the presence, absence, predisposition, risk or severity of cancers in a subject, the method comprising detecting a polypeptide as defined above in a sample from the subject by mass spectrometry, most preferably tandem mass spectrometry. In a preferred embodiment the method comprises creating spectra or fragmentation patterns specific of a polypeptide as defined above and running software programs or algorithms to search or compare such spectra or fragmentation patterns with the output of MS/MS experiments. In another preferred embodiment, the spectra or fragmentation patterns are specifically created for a polypeptide comprising a PSP sequence as contained in any one of SEQ ID NOs: 1-1596.

[0063] Another object of the invention relates to a method of detecting in vitro or ex vivo the presence, absence, predisposition, risk or severity of a disease in a biological sample, preferably, a human biological sample, comprising placing said sample in contact with a polypeptide as defined above and determining the presence of immune cells expressing a TCR specific for such a polypeptide. Preferably, the polypeptide comprises a PSP sequence as contained in any one of SEQ ID NOs: 1-1596.

[0064] A further aspect of this invention resides in a method of assessing in vitro or ex vivo the level of transcription infidelity in a subject, preferably, a human subject, comprising placing a sample from the subject in contact with a polypeptide as defined above and determining the formation of an immune complex. Most preferably, the polypeptide is immobilized on a support. In a preferred embodiment, the method comprises contacting the sample with a device as disclosed above and determining the formation of immune complexes.

[0065] A further aspect of this invention resides in a method of assessing in vitro or ex vivo the level of transcription infidelity in a subject, preferably, a human subject, comprising placing a sample from the subject in contact with an antibody that binds a polypeptide as defined above, and determining the formation of an immune complex. The antibody may be immobilized on a support. In a preferred embodiment, the antibody is specific for a polypeptide comprising a PSP sequence as contained in any one of SEQ ID NOs: 1-1596.

[0066] A further aspect of this invention resides in a method of assessing in vitro or ex vivo the level of transcription infidelity in a subject, preferably, a human subject, comprising placing a sample from the subject in contact with a polypeptide as defined above and determining the presence of immune cells expressing a TCR specific for such a polypeptide.

[0067] Another embodiment of this invention is directed to a method of determining the efficacy of a treatment of a cancer, the method comprising (i) determining the level of at least one polypeptide as defined above, in a sample from the subject and (ii) comparing said level to the level in a sample from said subject taken prior to or at an earlier stage of the treatment. Preferably, the polypeptide(s) comprise(s) a PSP sequence as contained in any one of SEQ ID NOs: 1-1596.

[0068] Another embodiment of this invention is directed to a method of determining the efficacy of a treatment of a cancer, the method comprising detecting a polypeptide as defined above in a sample from the subject by mass spectrometry, most preferably tandem mass spectrometry. In a preferred embodiment the method comprises creating spectra or fragmentation patterns specific of a polypeptide as defined above and running software programs or algorithms to search or compare such spectra or fragmentation patterns with the output of MS/MS experiments. In another preferred embodiment, the spectra or fragmentation patterns are specifically created for a polypeptide comprising a PSP sequence as contained in any one of SEQ ID NOs: 1-1596.

[0069] A further aspect of this invention is directed to a method of determining whether an individual is making a polypeptide comprising a PSP sequence as contained in any one of SEQ ID NOs: 1-1596, said method comprising contacting a sample obtained from said individual with an agent indicative of the presence of said polypeptide and determining whether said agent binds to said sample. In a first embodiment of said method, the sample obtained from the subject is placed in contact with a polypeptide which binds to an antibody specific for said polypeptide. In another embodiment, the sample obtained is placed in contact with a polypeptide which binds an immune cell comprising a TCR specific for said polypeptide. According to another embodiment, the sample is placed in contact with an antibody or portion thereof which is specific for said polypeptide.

[0070] The detection or diagnostic methods of the present invention can be performed in vitro, ex vivo or in vivo, preferably in vitro or ex vivo. The sample may be any biological sample derived from a subject, which contains polypeptides, antibodies or immune cells, as appropriate. Examples of such samples include body fluids, tissues, cell samples, organs, biopsies, etc. Most preferred samples are blood, plasma, serum, saliva, seminal fluid, and the like. The sample may be treated prior to performing the method, in order to render or improve availability of antibodies for testing. Treatments may include, for instance one or more of the following: cell lysis (e.g., mechanical, physical, chemical, etc.), centrifugation, extraction, column chromatography, and the like.

[0071] Determination of the presence, absence, or relative abundance of a protein, antibody or specific immune cell in a sample can be performed by a variety of techniques known per se in the art. Such techniques include, without limitation, methods for detecting an immune complex such as, without limitation, ELISA, radio-immunoassays (RIA), fluoro-immunoassays, microarray, microchip, dot-blot, western blot, EIA, IEMA, IRMA or IFMA (see also Immunoassays, a practical approach, Edited by JP Gosling, Oxford University Press). In a particular embodiment, the method comprises contacting the sample and polypeptide(s) under conditions allowing formation of an immune complex and revealing said formation using a second labelled reagent.

[0072] In a typical embodiment, the method comprises comparing the measured level to a reference level, wherein a difference is indicative of a dysfunction in the subject. More particularly, an increase in the level as compared to the reference value is indicative of the presence of a cancer. An increase is typically a 10%, 20%, 30%, 40%, 50% or more increase as compared to the reference value. The reference value may be a mean or median value determined from individuals not having a cancer or disease, a reference level obtained from a control patient, a reference level obtained from the subject before cancer onset or with a control polypeptide. In a preferred embodiment, an increase in the level of polypeptides, antibodies or immune cells in said sample as compared to the reference level is indicative of the presence, risk or stage of development of a cancer.

[0073] Contacting may be performed in any suitable device, such as a plate, microtitration dish, test tube, wells, glass, column, and so forth. In specific embodiments, the contacting is performed on a substrate coated with the polypeptide. The substrate may be a solid or semi-solid substrate such as any suitable support comprising glass, plastic, nylon, paper, metal, polymers and the like. The substrate may be of various forms and sizes, such as a slide, a membrane, a bead, a column, a gel, etc. The contacting may be made under any condition suitable for a detectable antibody-antigen complex to be formed between the polypeptide and antibodies of the sample.

[0074] In a specific embodiment, the method comprises contacting a sample from the subject with (a support coated with) a plurality of polypeptides as described above, and determining the presence of immune complexes. In a particular embodiment, the method comprises contacting the sample with a plurality of sets of beads, each set of beads being coated with a distinct polypeptide as defined above. In an other particular embodiment, the method comprises contacting the sample with a slide or membrane on which several polypeptides as defined above are arrayed. In an other particular embodiment, the method comprises contacting the sample with a multi-wells titration plate, wherein at least part of the wells are coated with distinct polypeptides as defined above.

[0075] The invention may be used for determining the presence, risk or stage of any cancer in a subject. This includes solid tumors, such as, without limitation, colon, lung, breast, ovarian, uterus, liver, or head and neck cancers, melanoma, and brain tumors, as well as liquid tumors, such as e.g., leukemia. The invention may also be used to detect other physiological disorders such as ageing, immune disorders, proliferative disorders.

[0076] The invention also allows the design (or screening) of novel drugs by assessing the ability of a candidate molecule to modulate expression of a polypeptide of this invention.

[0077] A particular object of this invention resides in a method of selecting, characterizing, screening or optimizing a biologically active compound, said method comprising determining whether a test compound modulates expression of a polypeptide of this invention.

[0078] Expression may be assessed at the gene, RNA or protein levels. For instance, expression may be assessed using a nucleic acid primer or probe as defined above, to detect any alteration in the transcription level. Expression may also be assessed using e.g., and antibody or any other specific ligand, to measure alteration in the translation level. The above screening assays may be performed in any suitable device, such as plates, tubes, dishes, flasks, etc. Typically, the assay is performed in multi-well microtiter dishes. Using the present invention, several test compounds can be assayed in parallel. Furthermore, the test compound may be of various origin, nature and composition. It may be any organic or inorganic substance, such as a lipid, peptide, polypeptide, nucleic acid, small molecule, in isolated or in mixture with other substances. The compounds may be all or part of a combinatorial library of compounds, for instance.

[0079] Further aspects and advantages of this invention will be disclosed in the following examples, which shall be considered as illustrative and not limiting the scope of protection.

### EXAMPLES

### Example 1

### Principle of Typical cDNA Library Construction and Sequencing (See FIG. 1)

[0080] The first step in preparing a complementary DNA (cDNA) library is to isolate the mature mRNA from the cell or tissue type of interest. Because of their poly(A) tail, it is straightforward to obtain a mixture of all cell mRNA by hybridization with complementary oligo dT linked covalently to a matrix. The bound mRNA is then eluted with a low salt buffer. The poly(A) tail of mRNA is then allowed to hybridize with oligo dT in the presence of a reverse transcriptase, an enzyme that synthesizes a complementary DNA strand from the mRNA template. This yields double strand nucleotides containing the original mRNA template and its complementary DNA sequence. Single strand DNA is next obtained by removing the RNA strand by alkali treatment or by the action of RNase H. A series of dG is then added to the 3′ end of single strand DNA by the action of an enzyme called terminal transferase, a DNA polymerase that does not require a template but adds deoxyoligonucleotide to the free 3′ end of each cDNA strand. The oligo dG is allowed to hybridize with oligo dC, which acts as a primer to synthesize, by the DNA polymerase, a DNA strand complementary to the original cDNA strand. These reactions produce a complete double strand DNA molecule corresponding to the mRNA molecules found in the original preparation. Each of these double strand DNA molecules are commonly referred to as cDNA, each containing an oligo dC-oligo dG double strand on one end and an oligo dT-oligo dA double strand region on the other end. This DNA is then protected by methylation at restriction sites. Short restriction linkers are then ligated to both ends. These are double strand synthetic DNA segments that contain the recognition site for a particular restriction enzyme. The ligation is carried out by DNA ligase from bacteriophage T4 which can join “blunt ended” double strand DNA molecules. The resulting double strand blunt ended DNA with a restriction site at each extremity is then treated with restriction enzyme that creates a sticky end. The final step in construction of cDNA libraries is ligation of the restriction cleaved double strand with a specific plasmid that is transfected into a bacterium. Recombinant bacteria are then grown to produce a library of plasmids—in the presence of antibiotics corresponding to the specific antibiotic resistance of the plasmid. Each clone carries a cDNA derived from a single part of mRNA. Each of these clones is then isolated and sequenced using classical sequencing methods. A typical run of sequencing starts at the insertion site and yields 400 to 800 base pair sequences for each clone. This sequence serves as a template to start the second run of sequencing. This forward progression leads to progressive sequencing of the entire plasmid insert. The results of sequencing of numerous cDNA designated ESTs have been deposited in several public databases.

### Example 2

### Database Annotation

[0081] EST databases contain sequence information that correspond to the cDNA sequence obtained from cDNA libraries and therefore correspond essentially to the sequence of individual mRNA present at any given time in the tissue that was used to produce these libraries. The quality of these sequences has been called into question for several reasons. First, as discussed above, the process of producing cDNA libraries initially relied heavily on the presence of a poly(A) tail at the 3′ end of eukaryotic mRNA. Second, mRNA are quite fragile molecules that are easily digested by high abundance nucleases called RNases. Third, while building and sequencing these libraries, little attention was paid to the quality of the original material used and its storage. Because of this, EST sequences have been used to annotate genomic information i.e., to determine whether an identified and fully sequenced segment of genomic DNA encodes any specific mRNA. In this context, EST sequences were useful in order to identify coding genomic sequence. However, little attention has been paid to the information borne by the EST sequence itself. Indeed, DNA genomic sequence is considered as much more reliable with strong technical arguments in support of this position. We speculate that diversity included in EST sequences might contain biologically, analytically or clinically relevant information. Indeed, EST databases were produced by a number of investigators that all used various methods: this led us to speculate that each methodological bias must contribute to a background noise level with a certain number of errors. However, if differences in errors were to exist due to the source of material used to generate the library, then the difference in error rate would be directly related to the underlying source.

### Example 3

### Genome-Wide Identification of Sequence Variations Between Ests from Normal and Cancer Origins Occurring within the Stop Codon

[0082] In order to test our hypothesis, we retrieved human EST databases available at the NCBI ftp site. We selected these databases because these sequences were not annotated or cured by human or bioinformatic tools.

[0083] We used a library identification system in order to determine whether an EST was obtained from a cancerous tissue or a normal one since each library has been labeled “normal” or “cancer”. By matching the accession number of each EST with the identifier of the corresponding library, we classified 3 millions ESTs as those obtained from cancerous tissues and 3.9 millions ESTs as those obtained from normal tissues. We built two sets of sequences that we named cancer and normal sets respectively (i.e. set of ESTs extracting from cancerous tissue and normal tissue respectively).

[0084] We then retrieved all human RNA RefSeq sequences from NCBI, i.e. 38746 RNA sequences:
[0085] transcripts products; mature messenger RNA (mRNA) transcripts. N=24704,
[0086] non-coding transcripts including structural RNAs, transcribed pseudogenes and others. N=898,
[0087] transcript products; model mRNA provided by a genome annotation process; sequence corresponds to the genomic contig. N=8721,
[0088] transcript products; model non-coding transcripts provided by a genome annotation process; sequence corresponds to the genomic contig. N=4423.

[0089] We retrieved all RefSeq sequences in order to be representative of the human transcriptome.

[0090] We then aligned each normal and each cancer EST to all RNA RefSeq. We used publicly available megaBLAST 2.2.16 software (Basic Local Alignment Search Tool,⁸) and selected default parameters except:
[0091] b 1: maximal number of sequences for which the alignment is reported,
[0092] p 90: minimal percent identity between EST and the reference sequence,
[0093] W 16: length of best perfect match to start with alignment extension.

[0094] For each EST, we retained only the best alignment. Therefore, each EST could match with no more than one RefSeq. We built two sets of alignment outputs, the first one corresponding to normal ESTs and the second one to cancer ESTs.

[0095] We then split alignments according to the corresponding RefSeq and obtained, for each RefSeq, a set of alignments with cancer ESTs and a set of alignments with normal ESTs. Out of 38746 transcripts, we found at least one alignment with cancer EST and one alignment with normal EST for 34184 transcripts.

[0096] We retained alignments for which EST aligned once and on more than 70% of its length.

[0097] We also cut the 10 first and last elements of each alignment.

[0098] This created a matrix associated with each RefSeq in which any given base is defined by the number of cancer and normal ESTs matching to this position. We then measured the proportion of ESTs deviating from RefSeq at any given position, i.e., the number of base substitutions at any position. We focused on the three positions corresponding to stop codon.

[0099] The next step of this analysis was to test the statistical significance of the differences in sequence substitutions occurring between cancer and normal ESTs. For each position, we compared the proportion of the RefSeq base to that of the three other bases between normal and cancer groups using proportion test. This test was systematically applied provided that the following conditions were met: n>70 and (nᵢ*nⱼ)/n>5 i=1, 2; j=1, 2 (where n=the number of cancer and normal ESTs for a position, n₁=the number of cancer ESTs, n₂=the number of normal ESTs, n₁=the number of ESTs having the RefSeq, n₂=the number of ESTs having a variation). A statistical test is said to be positive at the threshold level of 5% whenever corresponding P-value is lower than 0.05; in this case, the null hypothesis is rejected.

[0100] The two following one-sided proportion tests were considered in order to precise in which set the variability was bigger. The first one allowed to conclude that variabilities were different in both groups when statistical test is positive, then it measured in this case whether variability was statistically greater in the cancer set. On the contrary the second test verified the hypothesis that variability was significantly higher in the normal set.

[0101] An estimated error resulting from multiple testing, defined by the Location Based Estimator⁹ was also calculated.

[0102] Results of statistical analysis are shown in FIG. 2. Positions with statistically significant sequence substitutions are referred to as C>N if the variation is in excess in cancer and conversely N>C when in excess in normal. We obtained 48 C>N positions occurring within a stop codon (FIG. 3). We also identified 36 transcripts where the stop codon is significantly more substituted in cancer ESTs than in normal ones.

[0103] We therefore predict that the natural stop codon will be modified into an amino acid. This opens a new reading frame between the natural stop and the first alternative stop codon in frame. Out of the 36 identified transcripts, 4 have no alternate stop codon. For the 32 other transcripts, we determined the amino acid sequence which is translated when the canonical stop codon is substituted with an amino acid. This newly defined sequence is named “post-stop peptide” and corresponds to the peptide read after the canonical stop until the first alternate stop. 25 post-stop peptides, longer than 3 amino acids, are depicted in SEQ ID: 1 to 25.

### Example 4

### Identification of Additional Post-Stop Peptides

[0104] Significant base substitutions affecting the natural stop codon were observed in 36 transcripts. We can note that, in the genetic code, the UGA codon has a dual function as it can encode selenocysteine (Sec) and serve as a stop signal for proteins called selenoproteins. Nevertheless, only 25 human selenoprotein are described¹⁰, none of them belong to the set of 36 transcripts and UGA is the fewest represented stop codon within our 36 transcripts. Therefore, before the concept of transcription infidelity, it had not been proposed that usual human proteins would contain additional coding sequences encoded by RNA sequences considered thus far as “untranslated regions”. We now show that base substitution occurring in natural stop codons because of transcription infidelity reveals novel coding regions that encode specific AA. This novel coding region is in phase with the native open reading frame. The natural stop codon is transformed into a coding codon. The next triplet of base is then read as an AA and the translation proceeds with a novel coding region until a new stop codon is reached. The addition of these AA has the potential to create motifs that will be greatly enhanced in cancer; these motifs will or will not result in novel function of the proteins. Predicting this occurrence leads to development of useful tools that could be use in diagnostic, therapeutic or other goals. Predicting this occurrence leads also to development of specific antibodies that will recognize cancer specific sequences in the carboxy-terminal end of the protein. No analytical method is currently capable of direct protein sequencing at the carboxy-terminal end. It is, however, possible to cleave proteins enzymatically and sequence cleavage products from their NH₂ terminal end. It is also possible to analyze the AA content of peptides generated by proteolysis using mass spectrometry. The same phenomenon described above can further expand the reading to a novel set of sequences. Annotation of all protein sequences using our method will reveal several unsuspected coding mRNA sequences resulting from base substitution in the natural stop codon. On the basis of the occurrence of stop codon alterations, we estimate in affected genes that 2 to 10% of mRNA in cancer tissues contain these additional coding regions.

### Example 5

### Identification of Putative Post-Stop Peptides for Proteins of Interest

[0105] A specific program based on several filters can be used to annotate all protein sequences for the presence of a putative Post STOP Peptide (PSP). After retrieving nucleic sequence corresponding to the studied proteins, the program searches the presence or not of an in phase nucleic sequence after the canonical STOP, with another STOP in phase (the possibility to bypass one or more STOP in case of transcription infidelity affecting these alternative STOP codons can be taken into account). A minimal length can be fixed (e.g. only sequences coding more than 3 amino acids). PSPs are then stored. This program is applied to two sets of proteins sequences. The first set is constituted of 1784 tumor markers¹¹ (updated database, May 2007). The second set is constituted of 1175 sequences of plasma proteins¹². From the first set the program identifies 1109 putative PSPs corresponding to 1109 different RefSeq protein identifiers (>=3AA). From the second set the program identifies 913 putative PSPs (>=3AA). For these 1109 and 913 post stop sequences, we built predicted sequences as being the sequence of native protein—X—post stop peptide, which is called predicted aberrant protein PAP. X represents any amino acid. In fact, a stop codon can be substituted on the three positions of the codon (example: RPS3A, i.e. NM_{—}001006.3 FIG. 3). Thus, we have to consider that a mRNA can be substituted on 2 or 3 positions of the stop codon; stop codon can therefore be any of the 20 AA. We found 831 putative PSPs identified solely in the first set (the identification is based on the accession number of the protein NP). There are identical PAPs corresponding to different transcripts. Removal of these doublets leads to 725 different PAPs that are specific from the first set. The 725 PAPs are listed as SEQ ID Nos: 26 to 750. We then found 635 putative PSPs identified solely in the second set (the identification is also based on the accession number of the protein NP). Removal of the doublets leads to 594 different PAPs that are specific from the second set. The 594 PAPs are listed as SEQ ID Nos 751 to 1344. We also found 278 putative PSPs identified in the first and the second set. Removal of the doublets leads to 252 different PAPs. The 252 PAPs are listed as SEQ ID Nos: 1345 to 1596.

### Example 6

### Refining the Selection of Putative Post-Stop Peptides

[0106] We focus on novel proteins induced when the natural stop codon is affected. That leads to distinct specific populations of proteins with a novel sequence in the carboxy-terminal end. We estimate that cancerous tissues for affected genes contain 2 to 10% proteins that are longer than normal ones.

[0107] In view of this hypothesis, we select possible PSPs. The initial selection is based on a list of plasma proteins or tumor markers. We then apply additional criteria to refine this selection. For example certain post-stop peptide sequences are predicted to be immunogenic, and antibodies directed against these novel sequences represent specific ligands to measure transcription infidelity. Similarly, Kyte-Doolittle analysis can indicate that certain post-stop sequences are not hydrophobic, and therefore the corresponding novel proteins are expected to be secreted into the circulation.

### Example 7

### Identification of Post-Stop Peptide (PSP) of a Selected Protein X in a Biological Sample

[0108] Putative PSPs that result from base substitutions in the canonical stop codon are identified and characterized in a biological sample in the following manner. Rabbit polyclonal antibodies are prepared that recognize an immunogenic portion of the PSP in question. These anti-peptide antibodies are checked by dot blot using the purified peptide to verify that they indeed recognize the PSP. Western blots are then performed on samples obtained from cancer patients using the antibodies directed against the PSP. The anti-PSP Protein X antibody recognizes a band in Western blots performed on samples obtained from cancer patients, that is not observed when using rabbit pre-immune serum as a negative control. The PSP Protein X band has a slightly higher molecular mass as compared to that of the native monomer form of Protein X. This molecular mass corresponds to that predicted based on the additional peptide sequence. Two-dimensional gels can also be performed in order to further characterize this band.

[0109] Affinity chromatography experiments is carried out to isolate the PSP form of Protein X using the anti-PSP antibody. The anti-PSP antibody is immobilized on matrix beads and the following column is incubated in presence of sample then sequentially washed to remove aspecifically bound proteins and finally eluted with detergent or chaotropic reagents. The eluted fraction is analysed by Western blotting using both the anti-PSP and anti-Protein X antibodies. Two bands are recognized by the anti-Protein X antibody whereas only one band is recognized by the anti-PSP antibody. Therefore, the smaller molecular mass band corresponds to the native Protein X form and the larger molecular mass band corresponds to the PSP form of Protein X.

[0110] Protein X can be isolated by various methods, including sequential ultracentrifugation, gel filtration and preparative electrophoresis. The PSP form of Protein X is tracked by Western blotting. The purified PSP form of Protein X is then cleaved enzymatically (trypsin) and the resulting peptides are analyzed on MS-MS for full AA sequencing. Results show that canonical STOP is replaced preferentially by a specific amino acid sequence. This is the exact sequence of amino acid predicted to occur following bypass of Protein X canonical STOP.

### Example 8

### Large Scale Identification of Post-Stop Peptides by Tandem Mass Spectrometry

[0111] The large-scale identification of post-stop peptides can be conducted in any biological sample, including sera and various tissues.

[0112] The currency of information for tandem mass spectrometry (MS/MS) is the fragment ion spectrum of a specific peptide ion that is fragmented, typically in the collision cell of a tandem mass spectrometer. The correct assignment of such a spectrum to a peptide sequence can be done with a large number of computational approaches and software tools that have been developed to automatically assign peptide sequences to fragment ion spectra. However post-stop peptides are typically absent from existing spectra and sequences databases. Three approaches are therefore possible for the assignment of fragment ion spectra to post-stop peptides sequences:
[0113] i) De novo sequencing, where peptide sequences are explicitly read out directly from fragment ion spectra;
[0114] ii) database searching, where post-stop peptide sequences are identified by correlating acquired fragment ion spectra with theoretical spectra predicted for each post-stop peptide, or with libraries of experimental MS/MS spectra identified in previous experiments;
[0115] iii) hybrid approaches, such as those based on the extraction of short sequence tags of 3-5 residues in length, followed by error-tolerant database searching.

[0116] For large scale proteomics studies database searching remains the most frequently used peptide identification method. Several MS/MS database search programs are available (Table 1). The programs take the fragment ion spectrum of a peptide as input and score it against theoretical fragmentation patterns constructed for peptides from the searched database. The pool of candidate post-stop peptides is restricted based on criteria such as mass tolerance and proteolytic enzyme constraint. The output from the program is a list of fragment ion spectra matched to post-stop peptide sequences, ranked according to the search score. The search score measures the degree of similarity between the experimental and the theoretical spectrum.

[0117] In another approach a spectral library is compiled meticulously from a large collection of observed mass spectra of correctly identified post-stop peptides. An unknown spectrum can then be identified by comparing it to all the candidates in the spectral library to determine the match with the highest spectral similarity. The spectral matching method substantially outperforms database searching in speed, error-rate and sensitivity. However post-stop peptide identification requires prior entry of the post-stop peptide spectrum into the spectral library. Synthetic post-stop peptides can be used to create de novo spectral libraries.

[0118] A combination of the above methods is applied with the programs and databases listed in Table 1 to build fragmentation pattern databases and spectral libraries of specific post-stop peptides of known amino-acid sequence. These databases and libraries are then used for the large scale identification of post-stop peptides in sera or other tissue samples. The above methods are used for the systematic analysis of post-stop peptides of SEQ ID Nos: 1 to 1596 in biologic samples.

TABLE 1
Publicly available programs and databases for MS/MS-based post-stop peptide
analysis

| | | | | Statistical | |
|---|---|---|---|---|---|
| | | | Sequence | validation of | Databases |
| Database | Spectral | De novo | tag/hybrid | peptide | for storing |
| search | matching | sequencing | approaches | identifications | and mining |
| SEQUEST | SpectraST | Lutefisk | GutenTag | PeptideProphet | PeptideAtlas |
| MASCOT | X! P3 | Pepnovo | Inspect | Scaffold | Proteios |
| ProteinProspector | Biblispec | PEAKS | Popitam | | SBEAMS |
| ProbID | | Sequit | | | CPAS |
| TANDEM | | | | | PRIDE |
| SpectrumMill | | | | | |
| Phenyx | | | | | |
| OMSSA | | | | | |
| VEMS | | | | | |
| MyriMatch | | | | | |

### REFERENCES

[0119] 1. Brulliard, M. et al. Nonrandom variations in human cancer ESTs indicate that mRNA heterogeneity increases during carcinogenesis. Proc Natl Acad Sci USA 104, 7522-7 (2007).
[0120] 2. Sjoblom, T. et al. The consensus coding sequences of human breast and colorectal cancers. Science 314, 268-74 (2006).
[0121] 3. Sherry, S. T. et al. dbSNP: the NCBI database of genetic variation. Nucleic Acid Res 29, 308-11 (2001).
[0122] 4. Gott, J. M. & Emeson, R. B. Functions and mechanisms of RNA editing. Annu Rev Genet 34, 499-531 (2000).
[0123] 5. Armache, K. J., Kettenberger, H. & Cramer, P. The d namic machiner_{y} of mRNA elongation. Curr Opin Struct Biol 15, 197-20312005).
[0124] 6. Pomerantz, R. T., Temiakov, D., Anikin, M., Vassylyev, D. G. & McAllister, W. T. A mechanism of nucleotide misincorporation during transcription due to template-strand misalignment. Mol Cell 24, 245-55 (2006).
[0125] 7. Kashkina, E. et al. Template misalignment in multisubunit RNA polymerases and transcription fidelity. Mol Cell 24, 257-66 (2006).
[0126] 8. Zhang, Z., Schwartz, S., Wagner, L. & Miller, W. A greed, algorithm for aligning DNA sequences. J Comput Biol 7, 203-14 (2000).
[0127] 9. Dalmasso, C., Broet, P. Procédures d'estimation du false discovery rate basées sur la distribution des degrés de signification. Journal de la Société Frangaise de Statistiques 146 (2005).
[0128] 10. Kryukov, G. V. et al. Characterization of mammalian selenoproteomes. Science 300, 1439-43 (2003).
[0129] 11. Polanski, M., Anderson, N. L. A list of candidate cancer biomarkers for targeted proteomics. Biomarker Insights, 1-48 (2006).
[0130] 12. Anderson, N. L. et al. The human plasma proteome: a nonredundant list developed b combination of four separate sources. Mol Cell Proteomics 3, 311-26 (2004).

The application's sequence listing, which the Patent Office published only in electronic form, follows.

SEQUENCE LISTING (1596 sequences)

SEQ ID NO: 1 - protein, 211 aa, Homo Sapiens
  misc_feature (197)..(197): Xaa can be any naturally occurring amino acid
MSMLRLQKRLASSVLRCGKKKVWLDPNETNEIANANSRQQIRKLIKDGLIIRKPVTVHSRARCRKNTLARRKGRHMGIGKRKGTANARMPEKVTWMRRMRILRRLLRRYRESKKIDRHMYHSLYLKVKGNVFKNKRILMEHIHKLKADKARKKLLADQAEARRSKTKEARKRREERLQAKKEEIIKTLSKEEETKKXNLPLCLYILASVIT

SEQ ID NO: 2 - protein, 637 aa, Homo Sapiens
  misc_feature (565)..(565): Xaa can be any naturally occurring amino acid
MASTSTTIRSHSSSRRGFSANSARLPGVSRSGFSSVSVSRSRGSGGLGGACGGAGFGSRSLYGLGGSKRISIGGGSCAISGGYGSRAGGSYGFGGAGSGFGFGGGAGIGFGLGGGAGLAGGFGGPGFPVCPPGGIQEVTVNQSLLTPLNLQIDPTIQRVRAEEREQIKTLNNKFASFIDKVRFLEQQNKVLETKWTLLQEQGTKTVRQNLEPLFEQYINNLRRQLDSIVGERGRLDSELRGMQDLVEDFKNKYEDEINKRTAAENEFVTLKKDVDAAYMNKVELQAKADTLTDEINFLRALYDAELSQMQTHISDTSVVLSMDNNRNLDLDSIIAEVKAQYEEIAQRSRAEAESWYQTKYEELQVTAGRHGDDLRNTKQEIAEINRMIQRLRSEIDHVKKQCANLQAAIADAEQRGEMALKDAKNKLEGLEDALQKAKQDLARLLKEYQELMNVKLALDVEIATYRKLLEGEECRLNGEGVGQVNISVVQSTVSSGYGGASGVGSGLGLGGGSSYSYGSGLGVGGGFSSSSGRAIGGGLSSVGGGSSTIKYTTTSSSSRKSYKHXSASASSRSHSPQAPLWLQSPLLRLPFLSWPPVSPAVPGRAGYGCLVPSLLLSLSIPSEHPLLTIRSTSDFTS

SEQ ID NO: 3 - protein, 212 aa, Homo Sapiens
  misc_feature (165)..(165): Xaa can be any naturally occurring amino acid
MHRDSCPLDCKVYVGNLGNNGNKTELERAFGYYGPLRSVWVARNPPGFAFVEFEDPRDAADAVRELDGRTLCGCRVRVELSNGEKRSRNRGPPPSWGRRPRDDYRRRSPPPRRRSPRRRSFSRSRSRSLSRDRRRERSLSRERNHKPSRSFSRSRSRSRSNERKXKTVCKRSGVQEITSFDRSMYRKFKFCLRLHKLGAFLRCFSCSNLFVS

SEQ ID NO: 4 - protein, 188 aa, Homo Sapiens
  misc_feature (185)..(185): Xaa can be any naturally occurring amino acid
MVRYSLDPENPTKSCKSRGSNLRVHFKNTRETAQAIKGMHIRKATKYLKDVTLQKQCVPFRRYNGGVGRCAQAKQWGWTQGRWPKKSAEFLLHMLKNAESNAELKGLDVDSLVIEHIQVNKAPKMRRRTYRAHGRINPYMSSPCHIEMILTEKEQIVPKPEEEVAQKKKISQKKLKKQKLMAREXIQH

SEQ ID NO: 5 - protein, 200 aa, Homo Sapiens
  misc_feature (195)..(195): Xaa can be any naturally occurring amino acid
MFSSSAKIVKPNGEKPDEFESGISQALLELEMNSDLKAQLRELNITAAKEIEVGGGRKAIIIFVPVPQLKSFQKIQVRLVRELEKKFSGKHVVFIAQRRILPKPTRKSRTKNKQKRPRSRTLTAVHDAILEDLVFPSEIVGKRIRVKLDGSRLIKVHLDKAQQNNVEHKVETFSGVYKKLTGKDVNFEFPEFQLXTKMTK

SEQ ID NO: 6 - protein, 456 aa, Homo Sapiens
  misc_feature (376)..(376): Xaa can be any naturally occurring amino acid
MDDDIAALVVDNGSGMCKAGFAGDDAPRAVFPSIVGRPRHQGVMVGMGQKDSYVGDEAQSKRGILTLKYPIEHGIVTNWDDMEKIWHHTFYNELRVAPEEHPVLLTEAPLNPKANREKMTQIMFETFNTPAMYVAIQAVLSLYASGRTTGIVMDSGDGVTHTVPIYEGYALPHAILRLDLAGRDLTDYLMKILTERGYSFTTTAEREIVRDIKEKLCYVALDFEQEMATAASSSSLEKSYELPDGQVITIGNERFRCPEALFQPSFLGMESCGIHETTFNSIMKCDVDIRKDLYANTVLSGGTTMYPGIADRMQKEITALAPSTMKIKIIAPPERKYSVWIGGSILASLSTFQQMWISKQEYDESGPSIVHRKCFXADYDLVALHPFLTKPNLRRKQDEIGMALFVFFVLFWFFFFFWLDSGFKNWNGEGDSSRLERASPKVHNVAEDFDCTLLFF

SEQ ID NO: 7 - protein, 267 aa, Homo Sapiens
  misc_feature (257)..(257): Xaa can be any naturally occurring amino acid
MAAAVGRLLRASVARHVSAIPWGISATAALRPAACGRTSLTNLLCSGSSQAKLFSTSSSCHAPAVTQHAPYFKGTAVVNGEFKDLSLDDFKGKYLVLFFYPLDFTFVCPTEIVAFSDKANEFHDVNCEVVAVSVDSHFSHLAWINTPRKNGGLGHMNIALLSDLTKQISRDYGVLLEGSGLALRGLFIIDPNGVIKHLSVNDLPVGRSVEETLRLVKAFQYVETHGEVCPANWTPDSPTIKPSPAASKEYFQKVNQXITHVYLHLLN

SEQ ID NO: 8 - protein, 168 aa, Homo Sapiens
  misc_feature (159)..(159): Xaa can be any naturally occurring amino acid
MADIQTERAYQKQPTIFQNKKRVLLGETGKEKLPRYYKNIGLGFKTPKEAIEGTYIDKKCPFTGNVSIRGRILSGVVTKMKMQRTIVIRRDYLHYIRKYNRFEKRHKNMSVHLSPCFRDVQIGDIVTVGECRPLSKTVRFNVLKVTKAAGTKKQFQKFXGWTSARSPQ

SEQ ID NO: 9 - protein, 245 aa, Homo Sapiens
  misc_feature (212)..(212): Xaa can be any naturally occurring amino acid
MAPSRNGMVLKPHFHKDWQRRVATWFNQPARKIRRRKARQAKARRIAPRPASGPIRPIVRCPTVRYHTKVRAGRGFSLEELRVAGIHKKVARTIGISVDPRRRNKSTESLQANVQRLKEYRSKLILFPRKPSAPKKGDSSAEELKLATQLTGPVMPVRNVYKKEKARVITEEEKNFKAFASLRMARANARLFGIRAKRAKEAAEQDVEKKKXSPPGDLESVGSHAGSPRGVFRGNNWAWDGASLL

SEQ ID NO: 10 - protein, 115 aa, Homo Sapiens
  misc_feature (89)..(89): Xaa can be any naturally occurring amino acid
MASVVPVKDKKLLEVKLGELPSWILMRDFSPSGIFGAFQRGYYRYYNKYINVKKGSISGITMVLACYVLFSYSFSYKHLKHERLRKYHXRGHTLHPPTPRPWPEPLREEHNLNRC

SEQ ID NO: 11 - protein, 261 aa, Homo Sapiens
  misc_feature (249)..(249): Xaa can be any naturally occurring amino acid
MEGVEEKKKEVPAVPETLKKKRRNFAELKIKRLRKKFAQKMLRKARRKLIYEKAKHYHKEYRQMYRTEIRMARMARKAGNFYVPAEPKLAFVIRIRGINGVSPKVRKVLQLLRLRQIFNGTFVKLNKASINMLRIVEPYIAWGYPNLKSVNELIYKRGYGKINKKRIALTDNALIARSLGKYGIICMEDLIHEIYTVGKRFKEANNFLWPFKLSSPRGGMKKKTTHFVEGGDAGNREDQINRLIRRMNXGVYHDYFSKLVG

SEQ ID NO: 12 - protein, 241 aa, Homo Sapiens
  misc_feature (213)..(213): Xaa can be any naturally occurring amino acid
MNLFRFLGDLSHLLAIILLLLKIWKSRSCAGISGKSQVLFAVVFTARYLDLFTNYISLYNTCMKVVYIACSFTTVWLIYSKFKATYDGNHDTFRVEFLVVPTAILAFLVNHDFTPLEILWTFSIYLESVAILPQLFMVSKTGEAETITSHYLFALGVYRTLYLFNWIWRYHFEGFFDLIAIVAGLVQTVLYCDFFYLYITKVLKGKKLSLPAXPRSSPSLSSAAAGGRGRRQKMKSFPIQG

SEQ ID NO: 13 - protein, 471 aa, Homo Sapiens
  misc_feature (452)..(452): Xaa can be any naturally occurring amino acid
MRECISIHVGQAGVQIGNACWELYCLEHGIQPDGQMPSDKTIGGGDDSFNTFFSETGAGKHVPRAVFVDLEPTVIDEVRTGTYRQLFHPEQLITGKEDAANNYARGHYTIGKEIIDLVLDRIRKLADQCTGLQGFLVFHSFGGGTGSGFTSLLMERLSVDYGKKSKLEFSIYPAPQVSTAVVEPYNSILTTHTTLEHSDCAFMVDNEAIYDICRRNLDIERPTYTNLNRLISQIVSSITASLRFDGALNVDLTEFQTNLVPYPRIHFPLATYAPVISAEKAYHEQLSVAEITNACFEPANQMVKCDPRHGKYMACCLLYRGDVVPKDVNAAIATIKTKRSIQFVDWCPTGFKVGINYQPPTVVPGGDLAKVQRAVCMLSNTTAIAEAWARLDHKFDLMYAKRAFVHWYVGEGMEEGEFSEAREDMAALEKDYEEVGVDSVEGEGEEEGEEYXLSIPFGPAACHAPRISASA

SEQ ID NO: 14 - protein, 194 aa, Homo Sapiens
  misc_feature (188)..(188): Xaa can be any naturally occurring amino acid
MPVDLSKWSGPLSLQEVDEQPQHPLHVTYAGAAVDELGKVLTPTQVKNRPTSISWDGLDSGKLYTLVLTDPDAPSRKDPKYREWHHFLVVNMKGNDISSGTVLSDYVGSGPPKGTGLHRYVWLVYEQDRPLKCDEPILSNRSGDHRGKFKVASFRKKYELRAPVAGTCYQAEWDDYVPKLYEQLSGKXGVSLGT

SEQ ID NO: 15 - protein, 222 aa, Homo Sapiens
  misc_feature (218)..(218): Xaa can be any naturally occurring amino acid
MSSKVSRDTLYEAVREVLHGNQRKRRKFLETVELQISLKNYDPQKDKRFSGTVRLKSTPRPKFSVCVLGDQQHCDEAKAVDIPHMDIEALKKLNKNKKLVKKLAKKYDAFLASESLIKQIPRILGPGLNKAGKFPSLLTHNENMVAKVDEVKSTIKFQMKKVLCLAVAVGHVKMTDDELVYNIHLAVNFLVSLLKKNWQNVRALYIKSTMGKPQRLYXGTFE

SEQ ID NO: 16 - protein, 302 aa, Homo Sapiens
  misc_feature (294)..(294): Xaa can be any naturally occurring amino acid
MADDAGAAGGPGGPGGPGMGNRGGFRGGFGSGIRGRGRGRGRGRGRGRGARGGKAEDKEWMPVTKLGRLVKDMKIKSLEEIYLFSLPIKESEIIDFFLGASLKDEVLKIMPVQKQTRAGQRTRFKAFVAIGDYNGHVGLGVKCSKEVATAIRGAIILAKLSIVPVRRGYWGNKIGKPHTVPCKVTGRCGSVLVRLIPAPRGTGIVSAPVPKKLLMMAGIDDCYTSARGCTATLGNFAKATFDAISKTYSYLTPDLWKETVFTKSPYQEFTDHLVKTHTRVSVQRTQAPAVATTXGFYTRKIK

SEQ ID NO: 17 - protein, 270 aa, Homo Sapiens
  misc_feature (265)..(265): Xaa can be any naturally occurring amino acid
MAVGKNKRLTKGGKKGAKKKVVDPFSKKDWYDVKAPAMFNIRNIGKTLVTRTQGTKIASDGLKGRVFEVSLADLQNDEVAFRKFKLITEDVQGKNCLTNFHGMDLTRDKMCSMVKKWQTMIEAHVDVKTTDGYLLRLFCVGFTKKRNNQIRKTSYAQHQQVRQIRKKMMEIMTREVQTNDLKEVVNKLIPDSIGKDIEKACQSIYPLHDVFVRKVKMLKKPKFELGKLMELHGEGSSSGKATGDETGAKVERADGYEPPVQESVXSSDFK

SEQ ID NO: 18 - protein, 294 aa, Homo Sapiens
  misc_feature (265)..(265): Xaa can be any naturally occurring amino acid
MEAFLGSRSGLWAGGPAPGQFYRIPSTPDSFMDPASALYRGPITRTQNPMVTGTSVLGVKFEGGVVIAADMLGSYGSLARFRNISRIMRVNNSTMLGASGDYADFQYLKQVLGQMVIDEELLGDGHSYSPRAIHSWLTRAMYSRRSKMNPLWNTMVIGGYADGESFLGYVDMLGVAYEAPSLATGYGAYLAQPLLREVLEKQPVLSQTEARDLVERCMRVLYYRDARSYNRFQIATVTEKGVEIEGPLSTETNWDIAHMISGFEXNTDALSRTEVALLLTLNLASSKIDSSFVK

SEQ ID NO: 19 - protein, 326 aa, Homo Sapiens
  misc_feature (318)..(318): Xaa can be any naturally occurring amino acid
MTEQMTLRGTLKGHNGWVTQIATTPQFPDMILSASRDKTIIMWKLTRDETNYGIPQRALRGHSHFVSDVVISSDGQFALSGSWDGTLRLWDLTTGTTTRRFVGHTKDVLSVAFSSDNRQIVSGSRDKTIKLWNTLGVCKYTVQDESHSEWVSCVRFSPNSSNPIIVSCGWDKLVKVWNLANCKLKTNHIGHTGYLNTVTVSPDGSLCASGGKDGQAMLWDLNEGKHLYTLDGGDIINALCFSPNRYWLCAATGPSIKIWDLEGKIIVDELKQEVISTSSKAEPPQCTSLAWSADGQTLFAGYTDNLVRVWQVTIGTRXKFMAELYK

SEQ ID NO: 20 - protein, 260 aa, Homo Sapiens
  misc_feature (239)..(239): Xaa can be any naturally occurring amino acid
MAVEGGMKCVKFLLYVLLLAFCACAVGLIAVGVGAQLVLSQTIIQGATPGSLLPVVIIAVGVFLFLVAFVGCCGACKENYCLMITFAIFLSLIMLVEVAAAIAGYVFRDKVMSEFNNNFRQQMENYPKNNHTASILDRMQADFKCCGAANYTDWEKIPSMSKNRVPDSCCINVTVGCGINFNEKAIHKEGCVEKIGGWLRKNVLVVAAAALGIAFVEVLGIVFACCLVKSIRSGYEVMXGSGLLSLLIWGSGIVSSRFFN

SEQ ID NO: 21 - protein, 247 aa, Homo Sapiens
  misc_feature (194)..(194): Xaa can be any naturally occurring amino acid
MAAIRKKLVIVGDGACGKTCLLIVFSKDQFPEVYVPTVFENYVADIEVDGKQVELALWDTAGQEDYDRLRPLSYPDTDVILMCFSIDSPDSLENIPEKWTPEVKHFCPNVPIILVGNKKDLRNDEHTRRELAKMKQEPVKPEEGRDMANRIGAFGYMECSAKTKDGVREVFEMATRAALQARRGKKKSGCLVLXNLAASTALMRLILKCCLLILVYDYWPFSFIYNLPKITNQKSSCYQYLEANYDY

SEQ ID NO: 22 - protein, 528 aa, Homo Sapiens
  misc_feature (463)..(463): Xaa can be any naturally occurring amino acid
MGKEKTHINIVVIGHVDSGKSTTTGHLIYKCGGIDKRTIEKFEKEAAEMGKGSFKYAWVLDKLKAERERGITIDISLWKFETSKYYVTIIDAPGHRDFIKNMITGTSQADCAVLIVAAGVGEFEAGISKNGQTREHALLAYTLGVKQLIVGVNKMDSTEPPYSQKRYEEIVKEVSTYIKKIGYNPDTVAFVPISGWNGDNMLEPSANMPWFKGWKVTRKDGNASGTTLLEALDCILPPTRPTDKPLRLPLQDVYKIGGIGTVPVGRVETGVLKPGMVVTFAPVNVTTEVKSVEMHHEALSEALPGDNVGFNVKNVSVKDVRRGNVAGDSKNDPPMEAAGFTAQVIILNHPGQISAGYAPVLDCHTAHIACKFAELKEKIDRRSGKKLEDGPKFLKSGDAAIVDMVPGKPMCVESFSDYPPLGRFAVRDMRQTVAVGVIKAVDKKAAGAGKVTKSAQKAQKAKXILSLIPATPLLISGGRTVSELFVSIGHLSLVVKDWLMITMHRKTFRRKGECFVDHFGFLFCVWQF

SEQ ID NO: 23 - protein, 119 aa, Homo Sapiens
  misc_feature (114)..(114): Xaa can be any naturally occurring amino acid
MSAIQNLHSFDPFADASKGDDLLPAGTEDYIHIRIQQRNGRKTLTTVQGIADDYDKKKLVKAFKKKFACNGTVIEHPEYGEVIQLQGDQRKNICQFLVEIGLAKDDQLKVHGFXVLVAH

SEQ ID NO: 24 - protein, 225 aa, Homo Sapiens
  misc_feature (214)..(214): Xaa can be any naturally occurring amino acid
MAAPAVSGLSRQVRCFSTSVVRPFAKLVRPPVQVYGIEGRYATALYSAASKQNKLEQVEKELLRVAQILKEPKVAASVLNPYVKRSIKVKSLNDITAKERFSPLTTNLINLLAENGRLSNTQGVVSAFSTMMSVHRGEVPCTVTSASPLEEATLSELKTVLKSFLSQGQVLKLEAKTDPSILGGMIVRIGEKYVDMSVKTKIQKLGRAMREIVXKCWFSAISENS

SEQ ID NO: 25 - protein, 576 aa, Homo Sapiens
  misc_feature (551)..(551): Xaa can be any naturally occurring amino acid
MDGIVPDIAVGTKRGSDELFSTCVTNGPFIMSSNSASAANGNDSKKFKGDSRSAGVPSRVIHIRKLPIDVTEGEVISLGLPFGKVTNLLMLKGKNQAFIEMNTEEAANTMVNYYTSVTPVLRGQPIYIQFSNHKELKTDSSPNQARAQAALQAVNSVQSGNLALAASAAAVDAGMAMAGQSPVLRIIVENLFYPVTLDVLHQIFSKFGTVLKIITFTKNNQFQALLQYADPVSAQHAKLSLDGQNIYNACCTLRIDFSKLTSLNVKYNNDKSRDYTRPDLPSGDSQPSLDQTMAAAFASPYAGAGFPPTFAIPQAAGLSVPNVHGALAPLAIPSAAAAAAAAGRIAIPGLAGAGNSVLLVSNLNPERVTPQSLFILFGVYGDVQRVKILFNKKENALVQMADGNQAQLAMSHLNGHKLHGKPIRITLSKHQNVQLPREGQEDQGLTKDYGNSPLHRFKKPGSKNFQNIFPPSATLHLSNIPPSVSEEDLKVLFSSNGGVVKGFKFFQKDRKMALIQMGSVEEAVQALIDLHNHDLGENHHLRVSFSKSTIXGHRPPRPGPLATTSIIPEKSHFKNS

SEQ ID NO: 26 - protein, 1448 aa, Homo Sapiens
  misc_feature (1438)..(1438): Xaa can be any naturally occurring amino acid
MKDIDIGKEYIIPSPGYRSVRERTSTSGTHRDREDSKFRRTRPLECQDALETAARAEGLSLDASMHSQLRILDEEHPKGKYHHGLSALKPIRTTSKHQHPVDNAGLFSCMTFSWLSSLARVAHKKGELSMEDVWSLSKHESSDVNCRRLERLWQEELNEVGPDAASLRRVVWIFCRTRLILSIVCLMITQLAGFSGPAFMVKHLLEYTQATESNLQYSLLLVLGLLLTEIVRSWSLALTWALNYRTGVRLRGAILTMAFKKILKLKNIKEKSLGELINICSNDGQRMFEAAAVGSLLAGGPVVAILGMIYNVIILGPTGFLGSAVFILFYPAMMFASRLTAYFRRKCVAATDERVQKMNEVLTYIKFIKMYAWVKAFSQSVQKIREEERRILEKAGYFQSITVGVAPIVVVIASVVTFSVHMTLGFDLTAAQAFTVVTVFNSMTFALKVTPFSVKSLSEASVAVDRFKSLFLMEEVHMIKNKPASPHIKIEMKNATLAWDSSHSSIQNSPKLTPKMKKDKRASRGKKEKVRQLQRTEHQAVLAEQKGHLLLDSDERPSPEEEEGKHIHLGHLRLQRTLHSIDLEIQEGKLVGICGSVGSGKTSLISAILGQMTLLEGSIAISGTFAYVAQQAWILNATLRDNILFGKEYDEERYNSVLNSCCLRPDLAILPSSDLTEIGERGANLSGGQRQRISLARALYSDRSIYILDDPLSALDAHVGNHIFNSAIRKHLKSKTVLFVTHQLQYLVDCDEVIFMKEGCITERGTHEELMNLNGDYATIFNNLLLGETPPVEINSKKETSGSQKKSQDKGPKTGSVKKEKAVKPEEGQLVQLEEKGQGSVPWSVYGVYIQAAGGPLAFLVIMALFMLNVGSTAFSTWWLSYWIKQGSGNTTVTRGNETSVSDSMKDNPHMQYYASIYALSMAVMLILKAIRGVVFVKGTLRASSRLHDELFRRILRSPMKFFDTTPTGRILNRFSKDMDEVDVRLPFQAEMFIQNVILVFFCVGMIAGVFPWFLVAVGPLVILFSVLHIVSRVLIRELKRLDNITQSPFLSHITSSIQGLATIHAYNKGQEFLHRYQELLDDNQAPFFLFTCAMRWLAVRLDLISIALITTTGLMIVLMHGQIPPAYAGLAISYAVQLTGLFQFTVRLASETEARFTSVERINHYIKTLSLEAPARIKNKAPSPDWPQEGEVTFENAEMRYRENLPLVLKKVSFTIKPKEKIGIVGRTGSGKSSLGMALFRLVELSGGCIKIDGVRISDIGLADLRSKLSIIPQEPVLFSGTVRSNLDPFNQYTEDQIWDALERTHMKECIAQLPLKLESEVMENGDNFSVGERQLLCIARALLRHCKILILDEATAAMDTETDLLIQETIREAFADCTMLTIAHRLHTVLGSDRIMVLAQGQVVEFDTPSVLLSNDSSRFYAMFAAAENKVAVKGXLLPVDEVSFL

SEQ ID NO: 27 - protein, 659 aa, Homo Sapiens
  misc_feature (656)..(656): Xaa can be any naturally occurring amino acid
MSSSNVEVFIPVSQGNTNGFPATASNDLKAFTEGAVLSFHNICYRVKLKSGFLPCRKPVEKEILSNINGIMKPGLNAILGPTGGGKSSLLDVLAARKDPSGLSGDVLINGAPRPANFKCNSGYVVQDDVVMGTLTVRENLQFSAALRLATTMTNHEKNERINRVIQELGLDKVADSKVGTQFIRGVSGGERKRTSIGMELITDPSILFLDEPTTGLDSSTANAVLLLLKRMSKQGRTIIFSIHQPRYSIFKLFDSLTLLASGRLMFHGPAQEALGYFESAGYHCEAYNNPADFFLDIINGDSTAVALNREEDFKATEIIEPSKQDKPLIEKLAEIYVNSSFYKETKAELHQLSGGEKKKKITVFKEISYTTSFCHQLRWVSKRSFKNLLGNPQASIAQIIVTVVLGLVIGAIYFGLKNDSTGIQNRAGVLFFLTTNQCFSSVSAVELFVVEKKLFIHEYISGYYRVSSYFLGKLLSDLLPMRMLPSIIFTCIVYFMLGLKPKADAFFVMMFTLMMVAYSASSMALAIAAGQSVVSVATLLMTICFVFMMIFSGLLVNLTTIASWLSWLQYFSIPRYGFTALQHNEFLGQNFCPGLNATGNNPCNYATCTGEEYLVKQGIDLSPWGLWKNHVALACMIVIFLTIAYLKLLFLKKYSXISP

SEQ ID NO: 28 - protein, 1154 aa, Homo Sapiens
  misc_feature (1131)..(1131): Xaa can be any naturally occurring amino acid
MLEICLKLVGCKSKKGLSSSSSCYLEEALQRPVASDFEPQGLSEAARWNSKENLLAGPSENDPNLFVALYDFVASGDNTLSITKGEKLRVLGYNHNGEWCEAQTKNGQGWVPSNYITPVNSLEKHSWYHGPVSRNAAEYLLSSGINGSFLVRESESSPGQRSISLRYEGRVYHYRINTASDGKLYVSSESRFNTLAELVHHHSTVADGLITTLHYPAPKRNKPTVYGVSPNYDKWEMERTDITMKHKLGGGQYGEVYEGVWKKYSLTVAVKTLKEDTMEVEEFLKEAAVMKEIKHPNLVQLLGVCTREPPFYIITEFMTYGNLLDYLRECNRQEVNAVVLLYMATQISSAMEYLEKKNFIHRDLAARNCLVGENHLVKVADFGLSRLMTGDTYTAHAGAKFPIKWTAPESLAYNKFSIKSDVWAFGVLLWEIATYGMSPYPGIDLSQVYELLEKDYRMERPEGCPEKVYELMRACWQWNPSDRPSFAEIHQAFETMFQESSISDEVEKELGKQGVRGAVSTLLQAPELPTKTRTSRRAAEHRDTTDVPEMPHSKGQGESDPLDHEPAVSPLLPRKERGPPEGGLNEDERLLPKDKKTNLFSALIKKKKKTAPTPPKRSSSFREMDGQPERRGAGEEEGRDISNGALAFTPLDTADPAKSPKPSNGAGVPNGALRESGGSGFRSPHLWKKSSTLTSSRLATGEEEGGGSSSKRFLRSCSASCVPHGAKDTEWRSVTLPRDLQSTGRQFDSSTFGGHKSEKPALPRKRAGENRSDQVTRGTVTPPPRLVKKNEEAADEVFKDIMESSPGSSPPNLTPKPLRRQVTVAPASGLPHKEEAGKGSALGTPAAAEPVTPTSKAGSGAPGGTSKGPAEESRVRRHKHSSESPGRDKGKLSRLKPAPPPPPAASAGKAGGKPSQSPSQEAAGEAVLGAKTKATSLVDAVNSDAAKPSQPGEGLKKPVLPATPKPQSAKPSGTPISPAPVPSTLPSASSALAGDQPSSTAFIPLISTRVSLRKTRQPPERIASGAITKGVVLDSTEALCLAISRNSEQMASHSAVLEAGKNLYTFCVSYVDSIQQMRNKFAFREAINKLENNLRELQICPATAGSGPAATQDFSKLLSSVKEISDIVQRXQQSGVRCQARRSCLQHMRARPYP

SEQ ID NO: 29 - protein, 1267 aa, Homo Sapiens
  misc_feature (1183)..(1183): Xaa can be any naturally occurring amino acid
MGQQVGRVGEAPGLQQPQPRGIRGSSAARPSGRRRDPAGRTTETGFNIFTQHDHFASCVEDGFEGDKTGGSSPEALHRPYGCDVEPQALNEAIRWSSKENLLGATESDPNLFVALYDFVASGDNTLSITKGEKLRVLGYNQNGEWSEVRSKNGQGWVPSNYITPVNSLEKHSWYHGPVSRSAAEYLLSSLINGSFLVRESESSPGQLSISLRYEGRVYHYRINTTADGKVYVTAESRFSTLAELVHHHSTVADGLVTTLHYPAPKCNKPTVYGVSPIHDKWEMERTDITMKHKLGGGQYGEVYVGVWKKYSLTVAVKTLKEDTMEVEEFLKEAAVMKEIKHPNLVQLLGVCTLEPPFYIVTEYMPYGNLLDYLRECNREEVTAVVLLYMATQISSAMEYLEKKNFIHRDLAARNCLVGENHVVKVADFGLSRLMTGDTYTAHAGAKFPIKWTAPESLAYNTFSIKSDVWAFGVLLWEIATYGMSPYPGIDLSQVYDLLEKGYRMEQPEGCPPKVYELMRACWKWSPADRPSFAETHQAFETMFHDSSISEEVAEELGRAASSSSVVPYLPRLPILPSKTRTLKKQVENKENIEGAQDATENSASSLAPGFIRGAQASSGSPALPRKQRDKSPSSLLEDAKETCFTRDRKGGFFSSFMKKRNAPTPPKRSSSFREMENQPHKKYELTGNFSSVASLQHADGFSFTPAQQEANLVPPKCYGGSFAQRNLCNDDGGGGGGSGTAGGGWSGITGFFTPRLIKKTLGLRAGKPTASDDTSKPFPRSNSTSSMSSGLPEQDRMAMTLPRNCQRSKLQLERTVSTSSQPEENVDRANDMLPKKSEESAAPSRERPKAKLLPRGATALPLRTPSGDLAITEKDPPGVGVAGVAAAPKGKEKNGGARLGMAGVPEDGEQPGWPSPAKAAPVLPTTHNHKVPVLISPTLKHTPADVQLIGTDSQGNKFKLLSEHQVTSSGDKDRPRRVKPKCAPPPPPVMRLLQHPSICSDPTEEPTALTAGQSTSETQEGGKKAALGAVPISGKAGRPVMPPPQVPLPTSSISPAKMANGTAGTKVALRKTKQAAEKISADKISKEALLECADLLSSALTEPVPNSQLVDTGHQLLDYCSGYVDCIPQTRNKFAFREAVSKLELSLQELQVSSAAAGVPGTNPVLNNLLSCVQEISDVVQRXPLLAWWENAHISEGRGKRTCFPVFLFSENERLILECVYVKYLRSLSSHVYSFISKIRSKPHKYRRGKLSGGKAVVDRVGNCTGK

SEQ ID NO: 30 - protein, 1133 aa, Homo Sapiens
  misc_feature (1102)..(1102): Xaa can be any naturally occurring amino acid
MSAKAISEQTGKELLYKFICTTSAIQNRFKYARVTPDTDWARLLQDHPWLLSQNLVVKPDQLIKRRGKLGLVGVNLTLDGVKSWLKPRLGQEATVGKATGFLKNFLIEPFVPHSQAEEFYVCIYATREGDYVLFHHEGGVDVGDVDAKAQKLLVGVDEKLNPEDIKKHLLVHAPEDKKEILASFISGLFNFYEDLYFTYLEINPLVVTKDGVYVLDLAAKVDATADYICKVKWGDIEFPPPFGREAYPEEAYIADLDAKSGASLKLTLLNPKGRIWTMVAGGGASVVYSDTICDLGGVNELANYGEYSGAPSEQQTYDYAKTILSLMTREKHPDGKILIIGGSIANFTNVAATFKGIVRAIRDYQGPLKEHEVTIFVRRGGPNYQEGLRVMGEVGKTTGIPIHVFGTETHMTAIVGMALGHRPIPNQPPTAAHTANFLLNASGSTSTPAPSRTASFSESRADEVAPAKKAKPAMPQDSVPSPRSLQGKSTTLFSRHTKAIVWGMQTRAVQGMLDFDYVCSRDEPSVAAMVYPFTGDHKQKFYWGHKEILIPVFKNMADAMRKHPEVDVLINFASLRSAYDSTMETMNYAQIRTIAIIAEGIPEALTRKLIKKADQKGVTIIGPATVGGIKPGCFKIGNTGGMLDNILASKLYRPGSVAYVSRSGGMSNELNNIISRTTDGVYEGVAIGGDRYPGSTFMDHVLRYQDTPGVKMIVVLGEIGGTEEYKICRGIKEGRLTKPIVCWCIGTCATMFSSEVQFGHAGACANQASETAVAKNQALKEAGVFVPRSFDELGEIIQSVYEDLVANGVIVPAQEVPPPTVPMDYSWARELGLIRKPASFMTSICDERGQELIYAGMPITEVFKEEMGIGGVLGLLWFQKRLPKYSCQFIEMCLMVTADHGPAVSGAHNTIICARAGKDLVSSLTSGLLTIGDRFGGALDAAAKMFSKAFDSGIIPMEFVNKMKKEGKLIMGIGHRVKSINNPDMRVQILKDYVRQHFPATPLLDYALEVEKITTSKKPNLILNVDGLIGVAFVDMLRNCGSFTREEADEYIDIGALNGIFVLGRSMGFIGHYLDQKRLKQGLYRHPWDDISYVLPEHMSMXQSQEPYCSKLKTRSLPPRKSVQTAGSGACFI

SEQ ID NO: 31 - protein, 573 aa, Homo Sapiens
  misc_feature (506)..(506): Xaa can be any naturally occurring amino acid
MAESAGASSFFPLVVLLLAGSGGSGPRGVQALLCACTSCLQANYTCETDGACMVSIFNLDGMEHHVRTCIPKVELVPAGKPFYCLSSEDLRNTHCCYTDYCNRIDLRVPSGHLKEPEHPSMWGPVELVGIIAGPVFLLFLIIIIVFLVINYHQRVYHNRQRLDMEDPSCEMCLSKDKTLQDLVYDLSTSGSGSGLPLFVQRTVARTIVLQEIIGKGRFGEVWRGRWRGGDVAVKIFSSREERSWFREAEIYQTVMLRHENILGFIAADNKDNGTWTQLWLVSDYHEHGSLFDYLNRYTVTIEGMIKLALSAASGLAHLHMEIVGTQGKPGIAHRDLKSKNILVKKNGMCAIADLGLAVRHDAVTDTIDIAPNQRVGTKRYMAPEVLDETINMKHFDSFKCADIYALGLVYWEIARRCNSGGVHEEYQLPYYDLVPSDPSIEEMRKVVCDQKLRPNIPNWWQSYEALRVMGKMMRECWYANGAARLTALRIKKTLSQLSVQEDVKIXLLPLSTRSSWQRELRTAAALSVRWRPTSRFCPALCGQEPWPARGTEPGRDSLTPMLGLRQTPFLFTS

SEQ ID NO: 32 - protein, 531 aa, Homo Sapiens
  misc_feature (514)..(514): Xaa can be any naturally occurring amino acid
MGAAAKLAFAVFLISCSSGAILGRSETQECLFFNANWEKDRTNQTGVEPCYGDKDKRRHCFATWKNISGSIEIVKQGCWLDDINCYDRTDCVEKKDSPEVYFCCCEGNMCNEKFSYFPEMEVTQPTSNPVTPKPPYYNILLYSLVPLMLIAGIVICAFWVYRHHKMAYPPVLVPTQDPGPPPPSPLLGLKPLQLLEVKARGRFGCVWKAQLLNEYVAVKIFPIQDKQSWQNEYEVYSLPGMKHENILQFIGAEKRGTSVDVDLWLITAFHEKGSLSDFLKANVVSWNELCHIAETMARGLAYLHEDIPGLKDGHKPAISHRDIKSKNVLLKNNLTACIADFGLALKFEAGKSAGDTHGQVGTRRYMAPEVLEGAINFQRDAFLRIDMYAMGLVLWELASRCTAADGPVDEYMLPFEEEIGQHPSLEDMQEVVVHKKKRPVLRDYWQKHAGMAMLCETIEECWDHDAEARLSAGCVGERITQMQRLTNIITTEDIVTVVTMVTNVDFPPKESSLXWLRHLCTLRNGTLNWSC

SEQ ID NO: 33 - protein, 546 aa, Homo Sapiens
  misc_feature (513)..(513): Xaa can be any naturally occurring amino acid
MTAPWVALALLWGSLCAGSGRGEAETRECIYYNANWELERTNQSGLERCEGEQDKRLHCYASWRNSSGTIELVKKGCWLDDFNCYDRQECVATEENPQVYFCCCEGNFCNERFTHLPEAGGPEVTYEPPPTAPTLLTVLAYSLLPIGGLSLIVLLAFWMYRHRKPPYGHVDIHEDPGPPPPSPLVGLKPLQLLEIKARGRFGCVWKAQLMNDFVAVKIFPLQDKQSWQSEREIFSTPGMKHENLLQFIAAEKRGSNLEVELWLITAFHDKGSLTDYLKGNIITWNELCHVAETMSRGLSYLHEDVPWCRGEGHKPSIAHRDFKSKNVLLKSDLTAVLADFGLAVRFEPGKPPGDTHGQVGTRRYMAPEVLEGAINFQRDAFLRIDMYAMGLVLWELVSRCKAADGPVDEYMLPFEEEIGQHPSLEELQEVVVHKKMRPTIKDHWLKHPGLAQLCVTIEECWDHDAEARLSAGCVEERVSLIRRSVNGTTSDCLVSLVTSVTNVDLPPKESSIXAQDMSVCPDSVDLKKKGKKVVFCFGNPIKPTNT

SEQ ID NO: 34 - protein, 659 aa, Homo Sapiens
  misc_feature (656)..(656): Xaa can be any naturally occurring amino acid
MGSGARFPSGTLRVRWLLLLGLVGPVLGAARPGFQQTSHLSSYEIITPWRLTRERREAPRPYSKQVSYVIQAEGKEHIIHLERNKDLLPEDFVVYTYNKEGTLITDHPNIQNHCHYRGYVEGVHNSSIALSDCFGLRGLLHLENASYGIEPLQNSSHFEHIIYRMDDVYKEPLKCGVSNKDIEKETAKDEEEEPPSMTQLLRRRRAVLPQTRYVELFIVVDKERYDMMGRNQTAVREEMILLANYLDSMYIMLNIRIVLVGLEIWTNGNLINIVGGAGDVLGNFVQWREKFLITRRRHDSAQLVLKKGFGGTAGMAFVGTVCSRSHAGGINVFGQITVETFASIVAHELGHNLGMNHDDGRDCSCGAKSCIMNSGASGSRNFSSCSAEDFEKLTLNKGGNCLLNIPKPDEAYSAPSCGNKLVDAGEECDCGTPKECELDPCCEGSTCKLKSFAECAYGDCCKDCRFLPGGTLCRGKTSECDVPEYCNGSSQFCQPDVFIQNGYPCQNNKAYCYNGMCQYYDAQCQVIFGSKAKAAPKDCFIEVNSKGDRFGNCGFSGNEYKKCATGNALCGKLQCENVQEIPVFGIVPAIIQTPSRGTKCWGVDFQLGSDVPDPGMVNEGTKCGAGKICRNFQCVDASVLNYDCDVQKKCHGHGKXILH

SEQ ID NO: 35 - protein, 853 aa, Homo Sapiens
  misc_feature (838)..(838): Xaa can be any naturally occurring amino acid
MSQTGSHPGRGLAGRWLWGAQPCLLLPIVPLSWLVWLLLLLLASLLPSARLASPLPREEEIVFPEKLNGSVLPGSGAPARLLCRLQAFGETLLLELEQDSGVQVEGLTVQYLGQAPELLGGAEPGTYLTGTINGDPESVASLHWDGGALLGVLQYRGAELHLQPLEGGTPNSAGGPGAHILRRKSPASGQGPMCNVKAPLGSPSPRPRRAKRFASLSRFVETLVVADDKMAAFHGAGLKRYLLTVMAAAAKAFKHPSIRNPVSLVVTRLVILGSGEEGPQVGPSAAQTLRSFCAWQRGLNTPEDSDPDHFDTAILFTRQDLCGVSTCDTLGMADVGTVCDPARSCAIVEDDGLQSAFTAAHELGHVFNMLHDNSKPCISLNGPLSTSRHVMAPVMAHVDPEEPWSPCSARFITDFLDNGYGHCLLDKPEAPLHLPVTFPGKDYDADRQCQLTFGPDSRHCPQLPPPCAALWCSGHLNGHAMCQTKHSPWADGTPCGPAQACMGGRCLHMDQLQDFNIPQAGGWGPWGPWGDCSRTCGGGVQFSSRDCTRPVPRNGGKYCEGRRTRFRSCNTEDCPTGSALTFREEQCAAYNHRTDLFKSFPGPMDWVPRYTGVAPQDQCKLTCQAQALGYYYVLEPRVVDGTPCSPDSSSVCVQGRCIHAGCDRIIGSKKKFDKCMVCGGDGSGCSKQSGSFRKFRYGYNNVVTIPAGATHILVRQQGNPGHRSIYLALKLPDGSYALNGEYTLMPSPTDVVLPGAVSLRYSGATAASETLSGHGPLAQPLTLQVLVAGNPQDTRLRYSFFVPRPTPSTPRPTPQDWLHRRAQILEILRRRPWAGRKXPHYPGCPFWAPGPRT

SEQ ID NO: 36 - protein, 957 aa, Homo Sapiens
  misc_feature (931)..(931): Xaa can be any naturally occurring amino acid
MLLGWASLLLCAFRLPLAAVGPAATPAQDKAGQPPTAAAAAQPRRRQGEEVQERAEPPGHPHPLAQRRRSKGLVQNIDQLYSGGGKVGYLVYAGGRRFLLDLERDGSVGIAGFVPAGGGTSAPWRHRSHCFYRGTVDASPRSLAVFDLCGGLDGFFAVKHARYTLKPLLRGPWAEEEKGRVYGDGSARILHVYTREGFSFEALPPRASCETPASTPEAHEHAPAHSNPSGRAALASQLLDQSALSPAGGSGPQTWWRRRRRSISRARQVELLLVADASMARLYGRGLQHYLLTLASIANRLYSHASIENHIRLAVVKVVVLGDKDKSLEVSKNAATTLKNFCKWQHQHNQLGDDHEEHYDAAILFTREDLCGHHSCDTLGMADVGTICSPERSCAVIEDDGLHAAFTVAHEIGHLLGLSHDDSKFCEETFGSTEDKRLMSSILTSIDASKPWSKCTSATITEFLDDGHGNCLLDLPRKQILGPEELPGQTYDATQQCNLTFGPEYSVCPGMDVCARLWCAVVRQGQMVCLTKKLPAVEGTPCGKGRICLQGKCVDKTKKKYYSTSSHGNWGSWGSWGQCSRSCGGGVQFAYRHCNNPAPRNNGRYCTGKRAIYRSCSLMPCPPNGKSFRHEQCEAKNGYQSDAKGVKTFVEWVPKYAGVLPADVCKLTCRAKGTGYYVVFSPKVTDGTECRPYSNSVCVRGKCVRTGCDGIIGSKLQYDKCGVCGGDNSSCTKIVGTFNKKSKGYTDVVRIPEGATHIKVRQFKAKDQTRFTAYLALKKKNGEYLINGKYMISTSETIIDINGTVMNYSGWSHRDDFLHGMGYSATKEILIVQILATDPTKPLDVRYSFFVPKKSTPKVNSVTSHGSNKVGSHTSQPQWVTGPWLACSRTCDTGWHTRTVQCQDGNRKLAKGCPLSQRPSAFKQCLLKKCXPVVMILCTKITGGFSTDAVVVNRRST

SEQ ID NO: 37 - protein, 693 aa, Homo Sapiens
  misc_feature (521)..(521): Xaa can be any naturally occurring amino acid
MNPDLDTGHNTSAPAHWGELKNANFTGPNQTSSNSTLPQLDITRAISVGLVLGAFILFAIVGNILVILSVACNRHLRTPTNYFIVNLAMADLLLSFTVLPFSAALEVLGYWVLGRIFCDIWAAVDVLCCTASILSLCAISIDRYIGVRYSLQYPTLVTRRKAILALLSVWVLSTVISIGPLLGWKEPAPNDDKECGVTEEPFYALFSSLGSFYIPLAVILVMYCRVYIVAKRTTKNLEAGVMKEMSNSKELTLRIHSKNFHEDTLSSTKAKGHNPRSSIAVKLFKFSREKKAAKTLGIVVGMFILCWLPFFIALPLGSLFSTLKPPDAVFKVVFWLGYFNSCLNPIIYPCSSKEFKRAFVRILGCQCRGRGRRRRRRRRRLGGCAYTYRPWTRGGSLERSQSRKDSLDDSGSCLSGSQRTLPSASPSPGYLGRGAPPPVELCAFPEWKAPGALLSLPAPEPPGRRGRHDSGPLFTFKLLTEPESPGTDGGASNGGCEAAADVANGQPGFKSNMPLAPGQFXGPRAQLSFPGEENIVGGRGGRGGGGRGASTPGRRAPQGEPGGGPGRGAAAFLAGAWVPGTTRKAGPSMLRAWGTRRRRDLPLSLPLCIYKRVPLYLYLTVGARECDCAVCVCSACVCAWGRPVRARRLCAQEATGGVVCVVTSYLSSPSLYFTEGWHFGGVGNKVDIKGHFS

SEQ ID NO: 38 - protein, 421 aa, Homo Sapiens
  misc_feature (405)..(405): Xaa can be any naturally occurring amino acid
MAAGTAVGAWVLVLSLWGAVVGAQNITARIGEPLVLKCKGAPKKPPQRLEWKLNTGRTEAWKVLSPQGGGPWDSVARVLPNGSLFLPAVGIQDEGIFRCQAMNRNGKETKSNYRVRVYQIPGKPEIVDSASELTAGVPNKVGTCVSEGSYPAGTLSWHLDGKPLVPNEKGVSVKEQTRRHPETGLFTLQSELMVTPARGGDPRPTFSCSFSPGLPRHRALRTAPIQPRVWEPVPLEEVQLVVEPEGGAVAPGGTVTLTCEVPAQPSPQIHWMKDGVPLPLPPSPVLILPEIGPQDQGTYSCVATHSSHGPQESRAVSISIIEPGEEGPTAGSVGGSGLGTLALALGILGGLGTAALLIGVILWQRRQRRGEERKAPENQEEEEERAELNQSEEPEAGESSTGGPXGAHRQIPSISSLFFFP

SEQ ID NO: 39 - protein, 347 aa, Homo Sapiens
  misc_feature (343)..(343): Xaa can be any naturally occurring amino acid
MAAGTAVGAWVLVLSLWGAVVGAQNITARIGEPLVLKCKGAPKKPPQRLEWKLGGGPWDSVARVLPNGSLFLPAVGIQDEGIFRCQAMNRNGKETKSNYRVRVYQIPGKPEIVDSASELTAGVPNKVGTCVSEGSYPAGTLSWHLDGKPLVPNEKGVSVKEQTRRHPETGLFTLQSELMVTPARGGDPRPTFSCSFSPGLPRHRALRTAPIQPRVWEPVPLEEVQLVVEPEGGAVAPGGTVTLTCEVPAQPSPQIHWMKDVSDLERGAGRTRRGGANCRLCGRIRAGNSSPGPGDPGRPGDSRPAHWGHLVAKAATPRRGEEGPRKPGGRGGACRTESVGGTXGRRE

SEQ ID NO: 40 - protein, 854 aa, Homo Sapiens
  misc_feature (849)..(849): Xaa can be any naturally occurring amino acid
MNSSSANITYASRKRRKPVQKTVKPIPAEGIKSNPSKRHRDRLNTELDRLASLLPFPQDVINKLDKLSVLRLSVSYLRAKSFFDVALKSSPTERNGGQDNCRAANFREGLNLQEGEFLLQALNGFVLVVTTDALVFYASSTIQDYLGFQQSDVIHQSVYELIHTEDRAEFQRQLHWALNPSQCTESGQGIEEATGLPQTVVCYNPDQIPPENSPLMERCFICRLRCLLDNSSGFLAMNFQGKLKYLHGQKKKGKDGSILPPQLALFAIATPLQPPSILEIRTKNFIFRTKHKLDFTPIGCDAKGRIVLGYTEAELCTRGSGYQFIHAADMLYCAESHIRMIKTGESGMIVFRLLTKNNRWTWVQSNARLLYKNGRPDYIIVTQRPLTDEEGTEHLRKRNTKLPFMFTTGEAVLYEATNPFPAIMDPLPLRTKNGTSGKDSATTSTLSKDSLNPSSLLAAMMQQDESIYLYPASSTSSTAPFENNFFNESMNECRNWQDNTAPMGNDTILKHEQIDQPQDVNSFAGGHPGLFQDSKNSDLYSIMKNLGIDFEDIRHMQNEKFFRNDFSGEVDFRDIDLTDEILTYVQDSLSKSPFIPSDYQQQQSLALNSSCMVQEHLHLEQQQQHHQKQVVVEPQQQLCQKMKHMQVNGMFENWNSNQFVPFNCPQQDPQQYNVFTDLHGISQEFPYKSEMDSMPYTQNFISCNQPVLPQHSKCTELDYPMGSFEPSPYPTTSSLEDFVTCLQLPENQKHGLNPQSAIITPQTCYAGAVSMYQCQPEPQHTHVGQMQYNPVLPGQQAFLNKFQNGVLNETYPAELNNINNTQTTTHLQPLHHPSEARPFPDLTSSGFLXFQAQF

SEQ ID NO: 41 - protein, 1798 aa, Homo Sapiens
  misc_feature (1783)..(1783): Xaa can be any naturally occurring amino acid
MGAGSSTEQRSPEQPPEGSSTPAEPEPSGGGPSAEAAPDTTADPAIAASDPATKLLQKNGQLSTINGVAEQDELSLQEGDLNGQKGALNGQGALNSQEEEEVIVTEVGQRDSEDVSKRDSDKEMATKSAVVHDITDDGQEETPEIIEQIPSSESNLEELTQPTESQANDIGFKKVFKFVGFKFTVKKDKTEKPDTVQLLTVKKDEGEGAAGAGDHKDPSLGAGEAASKESEPKQSTEKPEETLKREQSHAEISPPAESGQAVEECKEEGEEKQEKEPSKSAESPTSPVTSETGSTFKKFFTQGWAGWRKKTSFRKPKEDEVEASEKKKEQEPEKVDTEEDGKAEVASEKLTASEQAHPQEPAESAHEPRLSAEYEKVELPSEEQVSGSQGPSEEKPAPLATEVFDEKIEVHQEEVVAEVHVSTVEERTEEQKTEVEETAGSVPAEELVEMDAEPQEAEPAKELVKLKETCVSGEDPTQGADLSPDEKVLSKPPEGVVSEVEMLSSQERMKVQGSPLKKLFTSTGLKKLSGKKQKGKRGGGDEESGEHTQVPADSPDSQEEQKGESSASSPEEPEEITCLEKGLAEVQQDGEAEEGATSDGEKKREGVTPWASFKKMVTPKKRVRRPSESDKEDELDKVKSATLSSTESTASEMQEEMKGSVEEPKPEEPKRKVDTSVSWEALICVGSSKKRARRGSSSDEEGGPKAMGGDHQKADEAGKDKETGTDGILAGSQEHDPGQGSSSPEQAGSPTEGEGVSTWESFKRLVTPRKKSKSKLEEKSEDSIAGSGVEHSTPDTEPGKEESWVSIKKFIPGRRKKRPDGKQEQAPVEDAGPTGANEDDSDVPAVVPLSEYDAVEREKMEAQQAQKSAEQPEQKAATEVSKELSESQVHMMAAAVADGTRAATIIEERSPSWISASVTEPLEQVEAEAALLTEEVLEREVIAEEEPPTVTEPLPENREARGDTVVSEAELTPEAVTAAETAGPLGAEEGTEASAAEETTEMVSAVSQLTDSPDTTEEATPVQEVEGGVPDIEEQERRTQEVLQAVAEKVKEESQLPGTGGPEDVLQPVQRAEAERPEEQAEASGLKKETDVVLKVDAQEAKTEPFTQGKVVGQTTPESFEKAPQVTESIESSELVTTCQAETLAGVKSQEMVMEQAIPPDSVETPTDSETDGSTPVADFDAPGTTQKDEIVEIHEENEVASGTQSGGTEAEAVPAQKERPPAPSSFVFQEETKEQSKMEDTLEHTDKEVSVETVSILSKTEGTQEADQYADEKTKDVPFFEGLEGSIDTGITVSREKVTEVALKGEGTEEAECKKDDALELQSHAKSPPSPVEREMVVQVEREKTEAEPTHVNEEKLEHETAVTVSEEVSKQLLQTVNVPIIDGAKEVSSLEGSPPPCLGQEEAVCTKIQVQSSEASFTLTAAAEEEKVLGETANILETGETLEPAGAHLVLEEKSSEKNEDFAAHPGEDAVPTGPDCQAKSTPVIVSATTKKGLSSDLEGEKTTSLKWKSDEVDEQVACQEVKVSVAIEDLEPENGILELETKSSKLVQNIIQTAVDQFVRTEETATEMLTSELQTQAHVIKADSQDAGQETEKEGEEPQASAQDETPITSAKEESESTAVGQAHSDISKDMSEASEKTMTVEVEGSTVNDQQLEEVVLPSEEEGGGAGTKSVPEDDGHALLAERIEKSLVEPKEDEKGDDVDDPENQNSALADTDASGGLTKESPDTNGPKQKEKEDAQEVELQEGKVHSESDKAITPQAQEELQKQERESAKSELTESXNIMQLNSLSVWKTRM

SEQ ID NO: 42 - protein, 1700 aa, Homo Sapiens
  misc_feature (1685)..(1685): Xaa can be any naturally occurring amino acid
MLGTITITVGQRDSEDVSKRDSDKEMATKSAVVHDITDDGQEETPEIIEQIPSSESNLEELTQPTESQANDIGFKKVFKFVGFKFTVKKDKTEKPDTVQLLTVKKDEGEGAAGAGDHKDPSLGAGEAASKESEPKQSTEKPEETLKREQSHAEISPPAESGQAVEECKEEGEEKQEKEPSKSAESPTSPVTSETGSTFKKFFTQGWAGWRKKTSFRKPKEDEVEASEKKKEQEPEKVDTEEDGKAEVASEKLTASEQAHPQEPAESAHEPRLSAEYEKVELPSEEQVSGSQGPSEEKPAPLATEVFDEKIEVHQEEVVAEVHVSTVEERTEEQKTEVEETAGSVPAEELVEMDAEPQEAEPAKELVKLKETCVSGEDPTQGADLSPDEKVLSKPPEGVVSEVEMLSSQERMKVQGSPLKKLFTSTGLKKLSGKKQKGKRGGGDEESGEHTQVPADSPDSQEEQKGESSASSPEEPEEITCLEKGLAEVQQDGEAEEGATSDGEKKREGVTPWASFKKMVTPKKRVRRPSESDKEDELDKVKSATLSSTESTASEMQEEMKGSVEEPKPEEPKRKVDTSVSWEALICVGSSKKRARRGSSSDEEGGPKAMGGDHQKADEAGKDKETGTDGILAGSQEHDPGQGSSSPEQAGSPTEGEGVSTWESFKRLVTPRKKSKSKLEEKSEDSIAGSGVEHSTPDTEPGKEESWVSIKKFIPGRRKKRPDGKQEQAPVEDAGPTGANEDDSDVPAVVPLSEYDAVEREKMEAQQAQKSAEQPEQKAATEVSKELSESQVHMMAAAVADGTRAATIIEERSPSWISASVTEPLEQVEAEAALLTEEVLEREVIAEEEPPTVTEPLPENREARGDTVVSEAELTPEAVTAAETAGPLGAEEGTEASAAEETTEMVSAVSQLTDSPDTTEEATPVQEVEGGVPDIEEQERRTQEVLQAVAEKVKEESQLPGTGGPEDVLQPVQRAEAERPEEQAEASGLKKETDVVLKVDAQEAKTEPFTQGKVVGQTTPESFEKAPQVTESIESSELVTTCQAETLAGVKSQEMVMEQAIPPDSVETPTDSETDGSTPVADFDAPGTTQKDEIVEIHEENEVASGTQSGGTEAEAVPAQKERPPAPSSFVFQEETKEQSKMEDTLEHTDKEVSVETVSILSKTEGTQEADQYADEKTKDVPFFEGLEGSIDTGITVSREKVTEVALKGEGTEEAECKKDDALELQSHAKSPPSPVEREMVVQVEREKTEAEPTHVNEEKLEHETAVTVSEEVSKQLLQTVNVPIIDGAKEVSSLEGSPPPCLGQEEAVCTKIQVQSSEASFTLTAAAEEEKVLGETANILETGETLEPAGAHLVLEEKSSEKNEDFAAHPGEDAVPTGPDCQAKSTPVIVSATTKKGLSSDLEGEKTTSLKWKSDEVDEQVACQEVKVSVAIEDLEPENGILELETKSSKLVQNIIQTAVDQFVRTEETATEMLTSELQTQAHVIKADSQDAGQETEKEGEEPQASAQDETPITSAKEESESTAVGQAHSDISKDMSEASEKTMTVEVEGSTVNDQQLEEVVLPSEEEGGGAGTKSVPEDDGHALLAERIEKSLVEPKEDEKGDDVDDPENQNSALADTDASGGLTKESPDTNGPKQKEKEDAQEVELQEGKVHSESDKAITPQAQEELQKQERESAKSELTESXNIMQLNSLSVWKTRM

SEQ ID NO: 43 - protein, 326 aa, Homo Sapiens
  misc_feature (317)..(317): Xaa can be any naturally occurring amino acid
MASRLLLNNGAKMPILGLGTWKSPPGQVTEAVKVAIDVGYRHIDCAHVYQNENEVGVAIQEKLREQVVKREELFIVSKLWCTYHEKGLVKGACQKTLSDLKLDYLDLYLIHWPTGFKPGKEFFPLDESGNVVPSDTNILDTWAAMEELVDEGLVKAIGISNFNHLQVEMILNKPGLKYKPAVNQIECHPYLTQEKLIQYCQSKGIVVTAYSPLGSPDRPWAKPEDPSLLEDPRIKAIAAKHNKTTAQVLIRFPMQRNLVVIPKSVTPERIAENFKVFDFELSSQDMTTLLSYNRNWRVCALLSCTSHKDYPFHEEFXSCGCLLVPK

SEQ ID NO: 44 - protein, 652 aa, Homo Sapiens
  misc_feature (481)..(481): Xaa can be any naturally occurring amino acid
MSDVAIVKEGWLHKRGEYIKTWRPRYFLLKNDGTFIGYKERPQDVDQREAPLNNFSVAQCQLMKTERPRPNTFIIRCLQWTTVIERTFHVETPEEREEWTTAIQTVADGLKKQEEEEMDFRSGSPSDNSGAEEMEVSLAKPKHRVTMNEFEYLKLLGKGTFGKVILVKEKATGRYYAMKILKKEVIVAKDEVAHTLTENRVLQNSRHPFLTALKYSFQTHDRLCFVMEYANGGELFFHLSRERVFSEDRARFYGAEIVSALDYLHSEKNVVYRDLKLENLMLDKDGHIKITDFGLCKEGIKDGATMKTFCGTPEYLAPEVLEDNDYGRAVDWWGLGVVMYEMMCGRLPFYNQDHEKLFELILMEEIRFPRTLGPEAKSLLSGLLKKDPKQRLGGGSEDAKEIMQHRFFAGIVWQHVYEKKLSPPFKPQVTSETDTRYFDEEFTAQMITITPPDQDDSMECVDSERRPHFPQFSYSASGTAXGGGGLRWTIAWRDGEAASCHDLYLMVFISRVHLREATLSSRAQMERRFCAVGSTLPRSGVGKKTILRVLIYFIQFVLRVWPQPSEQSDSRREMLRTSAAMRNVALGGRAGPAHVSPHSVSQPPWAVCHQLSVISLGPWASVQPGGTRCNLTMVCWPAPSPGGGRHTAAPQH

SEQ ID NO: 45 - protein, 582 aa, Homo Sapiens
  misc_feature (482)..(482): Xaa can be any naturally occurring amino acid
MNEVSVIKEGWLHKRGEYIKTWRPRYFLLKSDGSFIGYKERPEAPDQTLPPLNNFSVAECQLMKTERPRPNTFVIRCLQWTTVIERTFHVDSPDEREEWMRAIQMVANSLKQRAPGEDPMDYKCGSPSDSSTTEEMEVAVSKARAKVTMNDFDYLKLLGKGTFGKVILVREKATGRYYAMKILRKEVIIAKDEVAHTVTESRVLQNTRHPFLTALKYAFQTHDRLCFVMEYANGGELFFHLSRERVFTEERARFYGAEIVSALEYLHSRDVVYRDIKLENLMLDKDGHIKITDFGLCKEGISDGATMKTFCGTPEYLAPEVLEDNDYGRAVDWWGLGVVMYEMMCGRLPFYNQDHERLFELILMEEIRFPRTLSPEAKSLLAGLLKKDPKQRLGGGPSDAKEVMEHRFFLSINWQDVVQKKLLPPFKPQVTSEVDTRYFDDEFTAQSITITPPDRYDSLGLLELDQRTHFPQFSYSASIREXAVCPRRGRTLAAITAGWFFPPNFLLSLFGLCPHPHLLTPFPVLLQAPPRRTPAAPAAPASSLQPHLCAQTRIWKTPPPAQAWAVGRLEIQVLIHTSPSEG

SEQ ID NO: 46 - protein, 595 aa, Homo Sapiens
  misc_feature (480)..(480): Xaa can be any naturally occurring amino acid
MSDVTIVKEGWVQKRGEYIKNWRPRYFLLKTDGSFIGYKEKPQDVDLPYPLNNFSVAKCQLMKTERPKPNTFIIRCLQWTTVIERTFHVDTPEEREEWTEAIQAVADRLQRQEEERMNCSPTSQIDNIGEEEMDASTTHHKRKTMNDFDYLKLLGKGTFGKVILVREKASGKYYAMKILKKEVIIAKDEVAHTLTESRVLKNTRHPFLTSLKYSFQTKDRLCFVMEYVNGGELFFHLSRERVFSEDRTRFYGAEIVSALDYLHSGKIVYRDLKLENLMLDKDGHIKITDFGLCKEGITDAATMKTFCGTPEYLAPEVLEDNDYGRAVDWWGLGVVMYEMMCGRLPFYNQDHEKLFELILMEDIKFPRTLSSDAKSLLSGLLIKDPNKRLGGGPDDAKEIMRHSFFSGVNWQDVYDKKLVPPFKPQVTSETDTRYFDEEFTAQTITITPPEKYDEDGMDCMDNERRPHFPQFSYSASGREXVSFILLLHCHLQFITENDSWTSPVLALTHSRGTFRHPRPAKGPHPSPPFTLMKTHIHANTLQFLFLHEIVSQSKVSCCCCYCLTIIATLRSNFPTFGSHEPTIVHLCTNYHLLIF

SEQ ID NO: 47 - protein, 597 aa, Homo Sapiens
  misc_feature (584)..(584): Xaa can be any naturally occurring amino acid
MESKGASSCRLLFCLLISATVFRPGLGWYTVNSAYGDTIIIPCRLDVPQNLMFGKWKYEKPDGSPVFIAFRSSTKKSVQYDDVPEYKDRLNLSENYTLSISNARISDEKRFVCMLVTEDNVFEAPTIVKVFKQPSKPEIVSKALFLETEQLKKLGDCISEDSYPDGNITWYRNGKVLHPLEGAVVIIFKKEMDPVTQLYTMTSTLEYKTTKADIQMPFTCSVTYYGPSGQKTIHSEQAVFDIYYPTEQVTIQVLPPKNAIKEGDNITLKCLGNGNPPPEEFLFYLPGQPEGIRSSNTYTLTDVRRNATGDYKCSLIDKKSMIASTAITVHYLDLSLNPSGEVTRQIGDALPVSCTISASRNATVVWMKDNIRLRSSPSFSSLHYQDAGNYVCETALQEVEGLKKRESLTLIVEGKPQIKMTKKTDPSGLSKTIICHVEGFPKPAIQWTITGSGSVINQTEESPYINGRYYSKIIISPEENVTLTCTAENQLERTVNSLNVSAISIPEHDEADEISDENREKVNDQAKLIVGIVVGLLLAALVAGVVYWLYMKKSKTASKHVNKDLGNMEENKKLEENNHKTEAXERNCPSCPEIKII

SEQ ID NO: 48 - protein, 406 aa, Homo Sapiens
  misc_feature (365)..(365): Xaa can be any naturally occurring amino acid
MAHRFPALTQEQKKELSEIAQSIVANGKGILAADESVGTMGNRLQRIKVENTEENRRQFREILFSVDSSINQSIGGVILFHETLYQKDSQGKLFRNILKEKGIVVGIKLDQGGAPLAGTNKETTIQGLDGLSERCAQYKKDGVDFGKWRAVLRIADQCPSSLAIQENANALARYASICQQNGLVPIVEPEVIPDGDHDLEHCQYVTEKVLAAVYKALNDHHVYLEGTLLKPNMVTAGHACTKKYTPEQVAMATVTALHRTVPAAVPGICFLSGGMSEEDATLNLNAINLCPLPKPWKLSFSYGRALQASALAAWGGKAANKEATQEAFMKRAMANCQAAKGQYVHTGSSGAASTQSLFTACYTYXGPMPASLAPVLLVGGLKGSNFSSNPGNSTQLDLNCWKYNTC

SEQ ID NO: 49 - protein, 390 aa, Homo Sapiens
  misc_feature (365)..(365): Xaa can be any naturally occurring amino acid
MPHSYPALSAEQKKELSDIALRIVAPGKGILAADESVGSMAKRLSQIGVENTEENRRLYRQVLFSADDRVKKCIGGVIFFHETLYQKDDNGVPFVRTIQDKGIVVGIKVDKGVVPLAGTDGETTTQGLDGLSERCAQYKKDGADFAKWRCVLKISERTPSALAILENANVLARYASICQQNGIVPIVEPEILPDGDHDLKRCQYVTEKVLAAVYKALSDHHVYLEGTLLKPNMVTPGHACPIKYTPEEIAMATVTALRRTVPPAVPGVTFLSGGQSEEEASFNLNAINRCPLPRPWALTFSYGRALQASALNAWRGQRDNAGAATEEFIKRAEVNGLAAQGKYEGSGEDGGAAAQSLYIANHAYXVSTPYHSPWPSHLHPLLLVVMARAK

SEQ ID NO: 50 - protein, 572 aa, Homo Sapiens
  misc_feature (499)..(499): Xaa can be any naturally occurring amino acid
MTVFLSFAFLAAILTHIGCSNQRRSPENSGRRYNRIQHGQCAYTFILPEHDGNCRESTTDQYNTNALQRDAPHVEPDFSSQKLQHLEHVMENYTQWLQKLENYIVENMKSEMAQIQQNAVQNHTATMLEIGTSLLSQTAEQTRKLTDVETQVLNQTSRLEIQLLENSLSTYKLEKQLLQQTNEILKIHEKNSLLEHKILEMEGKHKEELDTLKEEKENLQGLVTRQTYIIQELEKQLNRATTNNSVLQKQQLELMDTVHNLVNLCTKEGVLLKGGKREEEKPFRDCADVYQAGFNKSGIYTIYINNMPEPKKVFCNMDVNGGGWTVIQHREDGSLDFQRGWKEYKMGFGNPSGEYWLGNEFIFAITSQRQYMLRIELMDWEGNRAYSQYDRFHIGNEKQNYRLYLKGHTGTAGKQSSLILHGADFSTKDADNDNCMCKCALMLTGGWWFDACGPSNLNGMFYTAGQNHGKLNGIKWHYFKGPSYSLRSTTMMIRPLDFXKRNVRSDYESNKEIRRSCQVRNCLKTSEANNIVSLPAISGSYVKSPRFLTVNLEPFEFTRVSTWGDSAHVARL

SEQ ID NO: 51 - protein, 502 aa, Homo Sapiens
  misc_feature (497)..(497): Xaa can be any naturally occurring amino acid
MWQIVFFTLSCDLVLAAAYNNFRKSMDSIGKKQYQVQHGSCSYTFLLPEMDNCRSSSSPYVSNAVQRDAPLEYDDSVQRLQVLENIMENNTQWLMKLENYIQDNMKKEMVEIQQNAVQNQTAVMIEIGTNLLNQTAEQTRKLTDVEAQVLNQTTRLELQLLEHSLSTNKLEKQILDQTSEINKLQDKNSFLEKKVLAMEDKHIIQLQSIKEEKDQLQVLVSKQNSIIEELEKKIVTATVNNSVLQKQQHDLMETVNNLLTMMSTSNSAKDPTVAKEEQISFRDCAEVFKSGHTTNGIYTLTFPNSTEEIKAYCDMEAGGGGWTIIQRREDGSVDFQRTWKEYKVGFGNPSGEYWLGNEFVSQLTNQQRYVLKIHLKDWEGNEAYSLYEHFYLSSEELNYRIHLKGLTGTAGKISSISQPGNDFSTKDGDNDKCICKCSQMLTGGWWFDACGPSNLNGMYYPQRQNTNKFNGIKWYYWKGSGYSLKATTMMIRPADFXTSQST

SEQ ID NO: 52 - protein, 350 aa, Homo Sapiens
  misc_feature (347)..(347): Xaa can be any naturally occurring amino acid
MAMVSEFLKQAWFIENEEQEYVQTVKSSKGGPGSAVSPYPTFNPSSDVAALHKAIMVKGVDEATIIDILTKRNNAQRQQIKAAYLQETGKPLDETLKKALTGHLEEVVLALLKTPAQFDADELRAAMKGLGTDEDTLIEILASRTNKEIRDINRVYREELKRDLAKDITSDTSGDFRNALLSLAKGDRSEDFGVNEDLADSDARALYEAGERRKGTDVNVFNTILTTRSYPQLRRVFQKYTKYSKHDMNKVLDLELKGDIEKCLTAIVKCATSKPAFFAEKLHQAMKGVGTRHKALIRIMVSRSEIDMNDIKAFYQKMYGISLCQAILDETKGDYEKILVALCGGNXTFP

SEQ ID NO: 53 - protein, 546 aa, Homo Sapiens
  misc_feature (506)..(506): Xaa can be any naturally occurring amino acid
MSYPGYPPPPGGYPPAAPGGGPWGGAAYPPPPSMPPIGLDNVATYAGQFNQDYLSGMAANMSGTFGGANMPNLYPGAPGAGYPPVPPGGFGQPPSAQQPVPPYGMYPPPGGNPPSRMPSYPPYPGAPVPGQPMPPPGQQPPGAYPGQPPVTYPGQPPVPLPGQQQPVPSYPGYPGSGTVTPAVPPTQFGSRGTITDAPGFDPLRDAEVLRKAMKGFGTDEQAIIDCLGSRSNKQRQQILLSFKTAYGKDLIKDLKSELSGNFEKTILALMKTPVLFDIYEIKEAIKGVGTDEACLIEILASRSNEHIRELNRAYKAEFKKTLEEAIRSDTSGHFQRLLISLSQGNRDESTNVDMSLAQRDAQELYAAGENRLGTDESKFNAVLCSRSRAHLVAVFNEYQRMTGRDIEKSICREMSGDLEEGMLAVVKCLKNTPAFFAERLNKAMRGAGTKDRTLIRIMVSRSETDLLDIRSEYKRMYGKSLYHDISGDTSGDYRKILLKICGGNDXTVTGGSLLPTCRQHQCQEKAKRMSVSNKSTNSPEIHRPRA

SEQ ID NO: 54 - protein, 335 aa, Homo Sapiens
  misc_feature (322)..(322): Xaa can be any naturally occurring amino acid
MAMATKGGTVKAASGFNAMEDAQTLRKAMKGLGTDEDAIISVLAYRNTAQRQEIRTAYKSTIGRDLIDDLKSELSGNFEQVIVGMMTPTVLYDVQELRRAMKGAGTDEGCLIEILASRTPEEIRRISQTYQQQYGRSLEDDIRSDTSFMFQRVLVSLSAGGRDEGNYLDDALVRQDAQDLYEAGEKKWGTDEVKFLTVLCSRNRNHLLHVFDEYKRISQKDIEQSIKSETSGSFEDALLAIVKCMRNKSAYFAEKLYKSMKGLGTDDNTLIRVMVSRAEIDMLDIRAHFKRLYGKSLYSFIKGDTSGDYRKVLLVLCGGDDXNKNPRRTGGFSTL

SEQ ID NO: 55 - protein, 473 aa, Homo Sapiens
  misc_feature (467)..(467): Xaa can be any naturally occurring amino acid
MSYPGYPPTGYPPFPGYPPAGQESSFPPSGQYPYPSGFPPMGGGAYPQVPSSGYPGAGGYPAPGGYPAPGGYPGAPQPGGAPSYPGVPPGQGFGVPPGGAGFSGYPQPPSQSYGGGPAQVPLPGGFPGGQMPSQYPGGQPTYPSQPATVTQVTQGTIRPAANFDAIRDAEILRKAMKGFGTDEQAIVDVVANRSNDQRQKIKAAFKTSYGKDLIKDLKSELSGNMEELILALFMPPTYYDAWSLRKAMQGAGTQERVLIEILCTRTNQEIREIVRCYQSEFGRDLEKDIRSDTSGHFERLLVSMCQGNRDENQSINHQMAQEDAQRLYQAGEGRLGTDESCFNMILATRSFPQLRATMEAYSRMANRDLLSSVSREFSGYVESGLKTILQCALNRPAFFAERLYYAMKGAGTDDSTLVRIVVTRSEIDLVQIKQMFAQMYQKTLGTMIAGDTSGDYRRLLLAIVGQXEGFFFF

SEQ ID NO: 56 - protein, 988 aa, Homo Sapiens
  misc_feature (952)..(952): Xaa can be any naturally occurring amino acid
MTDSKYFTTNKKGEIFELKAELNNEKKEKRKEAVKKVIAAMTVGKDVSSLFPDVVNCMQTDNLELKKLVYLYLMNYAKSQPDMAIMAVNSFVKDCEDPNPLIRALAVRTMGCIRVDKITEYLCEPLRKCLKDEDPYVRKTAAVCVAKLHDINAQMVEDQGFLDSLRDLIADSNPMVVANAVAALSEISESHPNSNLLDLNPQNINKLLTALNECTEWGQIFILDCLSNYNPKDDREAQSICERVTPRLSHANSAVVLSAVKVLMKFLELLPKDSDYYNMLLKKLAPPLVTLLSGEPEVQYVALRNINLIVQKRPEILKQEIKVFFVKYNDPIYVKLEKLDIMIRLASQANIAQVLAELKEYATEVDVDFVRKAVRAIGRCAIKVEQSAERCVSTLLDLIQTKVNYVVQEAIVVIRDIFRKYPNKYESIIATLCENLDSLDEPDARAAMIWIVGEYAERIDNADELLESFLEGFHDESTQVQLTLLTAIVKLFLKKPSETQELVQQVLSLATQDSDNPDLRDRGYIYWRLLSTDPVTAKEVVLSEKPLISEETDLIEPTLLDELICHIGSLASVYHKPPNAFVEGSHGIHRKHLPIHHGSTDAGDSPVGTTTATNLEQPQVIPSQGDLLGDLLNLDLGPPVNVPQVSSMQMGAVDLLGGGLDSLLGSDLGGGIGGSPAVGQSFIPSSVPATFAPSPTPAVVSSGLNDLFELSTGIGMAPGGYVAPKAVWLPAVKAKGLEISGTFTHRQGHIYMEMNFTNKALQHMTDFAIQFNKNSFGVIPSTPLAIHTPLMPNQSIDVSLPLNTLGPVMKMEPLNNLQVAVKNNIDVFYFSCLIPLNVLFVEDGKMERQVFLATWKDIPNENELQFQIKECHLNADTVSSKLQNNNVYTIAKRNVEGQDMLYQSLKLTNGIWILAELRIQPGNPNYTLSLKCRAPEVSQYIYQVYDSILKNXQDWSSTLQPCCDRCKSRTLNWKKLYCCVESEHTEAT

SEQ ID NO: 57 - protein, 974 aa, Homo Sapiens
  misc_feature (938)..(938): Xaa can be any naturally occurring amino acid
MTDSKYFTTNKKGEIFELKAELNNEKKEKRKEAVKKVIAAMTVGKDVSSLFPDVVNCMQTDNLELKKLVYLYLMNYAKSQPDMAIMAVNSFVKDCEDPNPLIRALAVRTMGCIRVDKITEYLCEPLRKCLKDEDPYVRKTAAVCVAKLHDINAQMVEDQGFLDSLRDLIADSNPMVVANAVAALSEISESHPNSNLLDLNPQNINKLLTALNECTEWGQIFILDCLSNYNPKDDREAQSICERVTPRLSHANSAVVLSAVKVLMKFLELLPKDSDYYNMLLKKLAPPLVTLLSGEPEVQYVALRNINLIVQKRPEILKQEIKVFFVKYNDPIYVKLEKLDIMIRLASQANIAQVLAELKEYATEVDVDFVRKAVRAIGRCAIKVEQSAERCVSTLLDLIQTKVNYVVQEAIVVIRDIFRKYPNKYESIIATLCENLDSLDEPDARAAMIWIVGEYAERIDNADELLESFLEGFHDESTQVQLTLLTAIVKLFLKKPSETQELVQQVLSLATQDSDNPDLRDRGYIYWRLLSTDPVTAKEVVLSEKPLISEETDLIEPTLLDELICHIGSLASVYHKPPNAFVEGSHGIHRKHLPIHHGSTDAGDSPVGTTTATNLEQPQVIPSQGDLLGDLLNLDLGPPVNVPQVSSMQMGAVDLLGGGLDSLVGQSFIPSSVPATFAPSPTPAVVSSGLNDLFELSTGIGMAPGGYVAPKAVWLPAVKAKGLEISGTFTHRQGHIYMEMNFTNKALQHMTDFAIQFNKNSFGVIPSTPLAIHTPLMPNQSIDVSLPLNTLGPVMKMEPLNNLQVAVKNNIDVFYFSCLIPLNVLFVEDGKMERQVFLATWKDIPNENELQFQIKECHLNADTVSSKLQNNNVYTIAKRNVEGQDMLYQSLKLTNGIWILAELRIQPGNPNYTLSLKCRAPEVSQYIYQVYDSILKNXQDWSSTLQPCCDRCKSRTLNWKKLYCCVESEHTEAT

SEQ ID NO: 58 - protein, 345 aa, Homo Sapiens
  misc_feature (339)..(339): Xaa can be any naturally occurring amino acid
MDAKARNCLLQHREALEKDIKTSYIMDHMISDGFLTISEEEKVRNEPTQQQRAAMLIKMILKKDNDSYVSFYNALLHEGYKDLAALLHDGIPVVSSSSGKDSVSGITSYVRTVLCEGGVPQRPVVFVTRKKLVNAIQQKLSKLKGEPGWVTIHGMAGCGKSVLAAEAVRDHSLLEGCFPGGVHWVSVGKQDKSGLLMKLQNLCTRLDQDESFSQRLPLNIEEAKDRLRILMLRKHPRSLLILDDVWDSWVLKAFDSQCQILLTTRDKSVTDSVMGPKYVVPVESSLGKEKGLEILSLFVNMKKADLPEQAHSIIKECKVVERCHWGILTDLLHKWNQSXENTRVP

SEQ ID NO: 59 - protein, 322 aa, Homo Sapiens
  misc_feature (319)..(319): Xaa can be any naturally occurring amino acid
MPKRGKKGAVAEDGDELRTEPEAKKSKTAAKKNDKEAAGEGPALYEDPPDQKTSPSGKPATLKICSWNVDGLRAWIKKKGLDWVKEEAPDILCLQETKCSENKLPAELQELPGLSHQYWSAPSDKEGYSGVGLLSRQCPLKVSYGIGDEEHDQEGRVIVAEFDSFVLVTAYVPNAGRGLVRLEYRQRWDEAFRKFLKGLASRKPLVLCGDLNVAHEEIDLRNPKGNKKNAGFTPQERQGFGELLQAVPLADSFRHLYPNTPYAYTFWTYMMNARSKNVGWRLDYFLLSHSLLPALCDSKIRSKALGSDHCPITLYLALXHHP

SEQ ID NO: 60 - protein, 655 aa, Homo Sapiens
  misc_feature (586)..(586): Xaa can be any naturally occurring amino acid
MAAVELEWIPETLYNTAISAVVDNYIRSRRDIRSLPENIQFDVYYKLYQQGRLCQLGSEFCELEVFAKVLRALDKRHLLHHCFQALMDHGVKVASVLAYSFSRRCSYIAESDAAVKEKAIQVGFVLGGFLSDAGWYSDAEKVFLSCLQLCTLHDEMLHWFRAVECCVRLLHVRNGNCKYHLGEETFKLAQTYMDKLSKHGQQANKAALYGELCALLFAKSHYDEAYKWCIEAMKEITAGLPVKVVVDVLRQASKACVVKREFKKAEQLIKHAVYLARDHFGSKHPKYSDTLLDYGFYLLNVDNICQSVAIYQAALDIRQSVFGGKNIHVATAHEDLAYSSYVHQYSSGKFDNALFHAERAIGIITHILPEDHLLLASSKRVKALILEEIAIDCHNKETEQRLLQEAHDLHLSSLQLAKKAFGEFNVQTAKHYGNLGRLYQSMRKFKEAEEMHIKAIQIKEQLLGQEDYEVALSVGHLASLYNYDMNQYENAEKLYLRSIAIGKKLFGEGYSGLEYDYRGLIKLYNSIGNYEKVFEYHNVLSNWNRLRDRQYSVTDALEDVSTSPQSTEEVVQSFLISQNVEGPSCXGRTSVNQLPFPGFQGIHTVKSKPCCFGGLEFALKHWSSPLKTLFWVIPILQNVCRNKHIFSYIQHVPHV

SEQ ID NO: 61 - protein, 272 aa, Homo Sapiens
  misc_feature (253)..(253): Xaa can be any naturally occurring amino acid
MRAPLLPPAPVVLSLLILGSGHYAAGLDLNDTYSGKREPFSGDHSADGFEVTSRSEMSSGSEISPVSEMPSSSEPSSGADYDYSEEYDNEPQIPGYIVDDSVRVEQVVKPPQNKTESENTSDKPKRKKKGGKNGKNRRNRKKKNPCNAEFQNFCIHGECKYIEHLEAVTCKCQQEYFGERCGEKSMKTHSMIDSSLSKIALAAIAAFMSAVILTAVAVITVQLRRQYVRKYEGEAEERKKLRQENGNVHAIAXLKIKLQDITLESLPSHSHK

SEQ ID NO: 62 - protein, 854 aa, Homo Sapiens
  misc_feature (790)..(790): Xaa can be any naturally occurring amino acid
MAATTANPEMTSDVPSLGPAIASGNSGPGIQGGGAIVQRAIKRRPGLDFDDDGEGNSKFLRCDDDQMSNDKERFARSDDEQSSADKERLARENHSEIERRRRNKMTAYITELSDMVPTCSALARKPDKLTILRMAVSHMKSLRGTGNTSTDGSYKPSFLTDQELKHLILEAADGFLFIVSCETGRVVYVSDSVTPVLNQPQSEWFGSTLYDQVHPDDVDKLREQLSTSENALTGRILDLKTGTVKKEGQQSSMRMCMGSRRSFICRMRCGSSSVDPVSVNRLSFVRNRCRNGLGSVKDGEPHFVVVHCTGYIKAWPPAGVSLPDDDPEAGQGSKFCLVAIGRLQVTSSPNCTDMSNVCQPTEFISRHNIEGIFTFVDHRCVATVGYQPQELLGKNIVEFCHPEDQQLLRDSFQQVVKLKGQVLSVMFRFRSKNQEWLWMRTSSFTFQNPYSDEIEYIICTNTNVKNSSQEPRPTLSNTIQRPQLGPTANLPLEMGSGQLAPRQQQQQTELDMVPGRDGLASYNHSQVVQPVTTTGPEHSKPLEKSDGLFAQDRDPRFSEIYHNINADQSKGISSSTVPATQQLFSQGNTFPPTPRPAENFRNSGLAPPVTIVQPSASAGQMLAQISRHSNPTQGATPTWTPTTRSGFSAQQVATQATAKTRTSQFGVGSFQTPSSFSSMSLPGAPTASPGAAAYPSLTNRGSNFAPETGQTAGQFQTRTAEGVGVWPQWQGQQPHHRSSSSEQHVQQPPAQQPGQPEVFQEMLSMLGDQSNSYNNEEFPDLTMFPPFSEXNYWGEDKGWGRKNHCLFLKSKSFCKQNKSSSPFPSLTPDMYPLSLLAVPLLCCLSKVTFIEEME

SEQ ID NO: 63 - protein, 3085 aa, Homo Sapiens
  misc_feature (3057)..(3057): Xaa can be any naturally occurring amino acid
MSLVLNDLLICCRQLEHDRATERKKEVEKFKRLIRDPETIKHLDRHSDSKQGKYLNWDAVFRFLQKYIQKETECLRIAKPNVSASTQASRQKKMQEISSLVKYFIKCANRRAPRLKCQELLNYIMDTVKDSSNGAIYGADCSNILLKDILSVRKYWCEISQQQWLELFSVYFRLYLKPSQDVHRVLVARIIHAVTKGCCSQTDGLNSKFLDFFSKAIQCARQEKSSSGLNHILAALTIFLKTLAVNFRIRVCELGDEILPTLLYIWTQHRLNDSLKEVIIELFQLQIYIHHPKGAKTQEKGAYESTKWRSILYNLYDLLVNEISHIGSRGKYSSGFRNIAVKENLIELMADICHQVFNEDTRSLEISQSYTTTQRESSDYSVPCKRKKIELGWEVIKDHLQKSQNDFDLVPWLQIATQLISKYPASLPNCELSPLLMILSQLLPQQRHGERTPYVLRCLTEVALCQDKRSNLESSQKSDLLKLWNKIWCITFRGISSEQIQAENFGLLGAIIQGSLVEVDREFWKLFTGSACRPSCPAVCCLTLALTTSIVPGTVKMGIEQNMCEVNRSFSLKESIMKWLLFYQLEGDLENSTEVPPILHSNFPHLVLEKILVSLTMKNCKAAMNFFQSVPECEHHQKDKEELSFSEVEELFLQTTFDKMDFLTIVRECGIEKHQSSIGFSVHQNLKESLDRCLLGLSEQLLNNYSSEITNSETLVRCSRLLVGVLGCYCYMGVIAEEEAYKSELFQKAKSLMQCAGESITLFKNKTNEEFRIGSLRNMMQLCTRCLSNCTKKSPNKIASGFFLRLLTSKLMNDIADICKSLASFIKKPFDRGEVESMEDDTNGNLMEVEDQSSMNLFNDYPDSSVSDANEPGESQSTIGAINPLAEEYLSKQDLLFLDMLKFLCLCVTTAQTNTVSFRAADIRRKLLMLIDSSTLEPTKSLHLHMYLMLLKELPGEEYPLPMEDVLELLKPLSNVCSLYRRDQDVCKTILNHVLHVVKNLGQSNMDSENTRDAQGQFLTVIGAFWHLTKERKYIFSVRMALVNCLKTLLEADPYSKWAILNVMGKDFPVNEVFTQFLADNHHQVRMLAAESINRLFQDTKGDSSRLLKALPLKLQQTAFENAYLKAQEGMREMSHSAENPETLDEIYNRKSVLLTLIAVVLSCSPICEKQALFALCKSVKENGLEPHLVKKVLEKVSETFGYRRLEDFMASHLDYLVLEWLNLQDTEYNLSSFPFILLNYTNIEDFYRSCYKVLIPHLVIRSHFDEVKSIANQIQEDWKSLLTDCFPKILVNILPYFAYEGTRDSGMAQQRETATKVYDMLKSENLLGKQIDHLFISNLPEIVVELLMTLHEPANSSASQSTDLCDFSGDLDPAPNPPHFPSHVIKATFAYISNCHKTKLKSILEILSKSPDSYQKILLAICEQAAETNNVYKKHRILKIYHLFVSLLLKDIKSGLGGAWAFVLRDVIYTLIHYINQRPSCIMDVSLRSFSLCCDLLSQVCQTAVTYCKDALENHLHVIVGTLIPLVYEQVEVQKQVLDLLKYLVIDNKDNENLYITIKLLDPFPDHVVFKDLRITQQKIKYSRGPFSLLEEINHFLSVSVYDALPLTRLEGLKDLRRQLELHKDQMVDIMRASQDNPQDGIMVKLVVNLLQLSKMAINHTGEKEVLEAVGSCLGEVGPIDFSTIAIQHSKDASYTKALKLFEDKELQWTFIMLTYLNNTLVEDCVKVRSAAVTCLKNILATKTGHSFWEIYKMTTDPMLAYLQPFRTSRKKFLEVPRFDKENPFEGLDDINLWIPLSENHDIWIKTLTCAFLDSGGTKCEILQLLKPMCEVKTDFCQTVLPYLIHDILLQDTNESWRNLLSTHVQGFFTSCLRHFSQTSRSTTPANLDSESEHFFRCCLDKKSQRTMLAVVDYMRRQKRPSSGTIFNDAFWLDLNYLEVAKVAQSCAAHFTALLYAEIYADKKSMDDQEKRSLAFEEGSQSTTISSLSEKSKEETGISLQDLLLEIYRSIGEPDSLYGCGGGKMLQPITRLRTYEHEAMWGKALVTYDLETAIPSSTRQAGIIQALQNLGLCHILSVYLKGLDYENKDWCPELEELHYQAAWRNMQWDHCTSVSKEVEGTSYHESLYNALQSLRDREFSTFYESLKYARVKEVEEMCKRSLESVYSLYPTLSRLQAIGELESIGELFSRSVTHRQLSEVYIKWQKHSQLLKDSDFSFQEPIMALRTVILEILMEKEMDNSQRECIKDILTKHLVELSILARTFKNTQLPERAIFQIKQYNSVSCGVSEWQLEEAQVFWAKKEQSLALSILKQMIKKLDASCAANNPSLKLTYTECLRVCGNWLAETCLENPAVIMQTYLEKAVEVAGNYDGESSDELRNGKMKAFLSLARFSDTQYQRIENYMKSSEFENKQALLKRAKEEVGLLREHKIQTNRYTVKVQRELELDELALRALKEDRKRFLCKAVENYINCLLSGEEHDMWVFRLCSLWLENSGVSEVNGMMKRDGMKIPTYKFLPLMYQLAARMGTKMMGGLGFHEVLNNLISRISMDHPHHTLFIILALANANRDEFLTKPEVARRSRITKNVPKQSSQLDEDRTEAANRIICTIRSRRPQMVRSVEALCDAYIILANLDATQWKTQRKGINIPADQPITKLKNLEDVVVPTMEIKVDHTGEYGNLVTIQSFKAEFRLAGGVNLPKIIDCVGSDGKERRQLVKGRDDLRQDAVMQQVFQMCNTLLQRNTETRKRKLTICTYKVVPLSQRSGVLEWCTGTVPIGEFLVNNEDGAHKRYRPNDFSAFQCQKKMMEVQKKSFEEKYEVFMDVCQNFQPVFRYFCMEKFLDPAIWFEKRLAYTRSVATSSIVGYILGLGDRHVQNILINEQSAELVHIDLGVAFEQGKILPTPETVPFRLTRDIVDGMGITGVEGVFRRCCEKTMEVMRNSQETLLTIVEVLLYDPLFDWTMNPLKALYLQQRPEDETELHPTLNADDQECKRNLSDIDQSFNKVAERVLMRLQEKLKGVEEGTVLSVGGQVNLLIQQAIDPKNLSRLFPGWKAWVXSSVYELPFHSAFRNYILAFIFNLPTYFK

SEQ ID NO: 64 - protein, 412 aa, Homo Sapiens
  misc_feature (404)..(404): Xaa can be any naturally occurring amino acid
MDRSKENCISGPVKATAPVGGPKRVLVTQQFPCQNPLPVNSGQAQRVLCPSNSSQRIPLQAQKLVSSHKPVQNQKQKQLQATSVPHPVSRPLNNTQKSKQPLPSAPENNPEEELASKQKNEESKKRQWALEDFEIGRPLGKGKFGNVYLAREKQSKFILALKVLFKAQLEKAGVEHQLRREVEIQSHLRHPNILRLYGYFHDATRVYLILEYAPLGTVYRELQKLSKFDEQRTATYITELANALSYCHSKRVIHRDIKPENLLLGSAGELKIADFGWSVHAPSSRRTTLCGTLDYLPPEMIEGRMHDEKVDLWSLGVLCYEFLVGKPPFEANTYQETYKRISRVEFTFPDFVTEGARDLISRLLKHNPSQRPMLREVLEHPWITANSSKPSNCQNKESASKQSXESCRGRNP

SEQ ID NO: 65 - protein, 167 aa, Homo Sapiens
  misc_feature (120)..(120): Xaa can be any naturally occurring amino acid
MSRSVALAVLALLSLSGLEAIQRTPKIQVYSRHPAENGKSNFLNCYVSGFHPSDIEVDLLKNGERIEKVEHSDLSFSKDWSFYLLYYTEFTPTEKDEYACRVNHVTLSQPKIVKWDRDMXAASWRFEDAAFGLDEFQILLACFLILICLYTYTLCTKCRVIIMLTWT

SEQ ID NO: 66 - protein, 212 aa, Homo Sapiens
  misc_feature (169)..(169): Xaa can be any naturally occurring amino acid
MFQIPEFEPSEQEDSSSAERGLGPSPAGDGPSGSGKHHRQAPGLLWDASHQQEQPTSSSHHGGAGAVEIRSRHSSYPAGTEDDEGMGEEPSPFRGRSRSAPPNLWAAQRYGRELRRMSDEFVDSFKKGLPRPKSAGTATQMRQSSSWTRVFQSWWDRNLGRGSSAPSQXPSLHIPKLHPFPLPWAAILNMGGSTSLRPMQKEDPCCLLWREG

SEQ ID NO: 67 - protein, 226 aa, Homo Sapiens
  misc_feature (193)..(193): Xaa can be any naturally occurring amino acid
MDGSGEQPRGGGPTSSEQIMKTGALLLQGFIQDRAGRMGGEAPELALDPVPQDASTKKLSECLKRIGDELDSNMELQRMIAAVDTDSPREVFFRVAADMFSDGNFNWGRVVALFYFASKLVLKALCTKVPELIRTIMGWTLDFLRERLLGWIQDQGGWDGLLSYFGTPTWQTVTIFVAGVLTASLTIWKKMGXGPQLPWTVFFLHKLWHFSGRGGDWGTWAFFLLL

SEQ ID NO: 68 - protein, 231 aa, Homo Sapiens
  misc_feature (219)..(219): Xaa can be any naturally occurring amino acid
MDGSGEQPRGGGPTSSEQIMKTGALLLQGFIQDRAGRMGGEAPELALDPVPQDASTKKLSECLKRIGDELDSNMELQRMIAAVDTDSPREVFFRVAADMFSDGNFNWGRVVALFYFASKLVLKALCTKVPELIRTIMGWTLDFLRERLLGWIQDQGGWVRLLKPPHPHHRALTTAPAPPSLPPATPLGPWAFWSRSQWCPLPIFRSSDVVYNAFSLRVXSIPDSSTLLTSQ

SEQ ID NO: 69 - protein, 804 aa, Homo Sapiens
  misc_feature (774)..(774): Xaa can be any naturally occurring amino acid
MSRRKQGKPQHLSKREFSPEPLEAILTDDEPDHGPLGAPEGDHDLLTCGQCQMNFPLGDILIFIEHKRKQCNGSLCLEKAVDKPPSPSPIEMKKASNPVEVGIQVTPEDDDCLSTSSRGICPKQEHIADKLLHWRGLSSPRSAHGALIPTPGMSAEYAPQGICKDEPSSYTCTTCKQPFTSAWFLLQHAQNTHGLRIYLESEHGSPLTPRVGIPSGLGAECPSQPPLHGIHIADNNPFNLLRIPGSVSREASGLAEGRFPPTPPLFSPPPRHHLDPHRIERLGAEEMALATHHPSAFDRVLRLNPMAMEPPAMDFSRRLRELAGNTSSPPLSPGRPSPMQRLLQPFQPGSKPPFLATPPLPPLQSAPPPSQPPVKSKSCEFCGKTFKFQSNLVVHRRSHTGEKPYKCNLCDHACTQASKLKRHMKTHMHKSSPMTVKSDDGLSTASSPEPGTSDLVGSASSALKSVVAKFKSENDPNLIPENGDEEEEEDDEEEEEEEEEEEEELTESERVDYGFGLSLEAARHHENSSRGAVVGVGDESRALPDVMQGMVLSSMQHFSEAFHQVLGEKHKRGHLAEAEGHRDTCDEDSVAGESDRIDDGTVNGRGCSPGESASGGLSKKLLLGSPSSLSPFSKRIKLEKEFDLPPAAMPNTENVYSQWLAGYAASRQLKDPFLSFGDSRQSPFASSSEHSSENGSLRFSTPPGELDGGISGRSGTGSGGSTPHISGPGPGRPSSKEGRRSDTCSSHTPIRRSTQRAQDVWQFSDGSSRALKFXENLKPPGVGWTRAAQSTSAWSVILLVCDVF

SEQ ID NO: 70 - protein, 873 aa, Homo Sapiens
  misc_feature (836)..(836): Xaa can be any naturally occurring amino acid
MSRRKQGKPQHLSKREFSPEPLEAILTDDEPDHGPLGAPEGDHDLLTCGQCQMNFPLGDILIFIEHKRKQCNGSLCLEKAVDKPPSPSPIEMKKASNPVEVGIQVTPEDDDCLSTSSRGICPKQEHIADKLLHWRGLSSPRSAHGALIPTPGMSAEYAPQGICKDEPSSYTCTTCKQPFTSAWFLLQHAQNTHGLRIYLESEHGSPLTPRVGIPSGLGAECPSQPPLHGIHIADNNPFNLLRIPGSVSREASGLAEGRFPPTPPLFSPPPRHHLDPHRIERLGAEEMALATHHPSAFDRVLRLNPMAMEPPAMDFSRRLRELAGNTSSPPLSPGRPSPMQRLLQPFQPGSKPPFLATPPLPPLQSAPPPSQPPVKSKSCEFCGKTFKFQSNLVVHRRSHTGEKPYKCNLCDHACTQASKLKRHMKTHMHKSSPMTVKSDDGLSTASSPEPGTSDLVGSASSALKSVVAKFKSENDPNLIPENGDEEEEEDDEEEEEEEEEEEEELTESERVDYGFGLSLEAARHHENSSRGAVVGVGDESRALPDVMQGMVLSSMQHFSEAFHQVLGEKHKRGHLAEAEGHRDTCDEDSVAGESDRIDDGTVNGRGCSPGESASGGLSKKLLLGSPSSLSPFSKRIKLEKEFDLPPAAMPNTENVYSQWLAGYAASRQLKDPFLSFGDSRQSPFASSSEHSSENGSLRFSTPPGELDGGISGRSGTGSGGSTPHISGPGPGRPSSKEGRRSDTCEYCGKVFKNCSNLTVHRRSHTGERPYKCELCNYACAQSSKLTRHMKTHGQVGKDVYKCEICKMPFSVYSTLEKHMKKWHSDRVLNNDIKTEXRYINTPPSLPPDTPFFTTPLPHRPPAPLPVGFFSSPM

SEQ ID NO: 71 - protein, 267 aa, Homo Sapiens
  misc_feature (240)..(240): Xaa can be any naturally occurring amino acid
MAHAGRTGYDNREIVMKYIHYKLSQRGYEWDAGDVGAAPPGAAPAPGIFSSQPGHTPHPAASRDPVARTSPLQTPAAPGAAAGPALSPVPPVVHLTLRQAGDDFSRRYRRDFAEMSSQLHLTPFTARGRFATVVEELFRDGVNWGRIVAFFEFGGVMCVESVNREMSPLVDNIALWMTEYLNRHLHTWIQDNGGWDAFVELYGPSMRPLFDFSWLSLKTLLSLALVGACITLGAYLGHKXSQHACPKQICKRFTKAVEIICIVSDVP

SEQ ID NO: 72 - protein, 187 aa, Homo Sapiens
  misc_feature (176)..(176): Xaa can be any naturally occurring amino acid
MTDCEFGYIYRLAQDYLQCVLQIPQPGSGPSKTSRVLQNVAFSVQKEVEKNLKSCLDNVNVVSVDTARTLFNQVMEKEFEDGIINWGRIVTIFAFEGILIKKLLRQQIAPDVDTYKEISYFVAEFIMNNTGEWIRQNGGWENGFVKKFEPKSGWMTFLEVTGKICEMLSLLKQYCXPERTLHIVKPA

SEQ ID NO: 73 - protein, 231 aa, Homo Sapiens
  misc_feature (171)..(171): Xaa can be any naturally occurring amino acid
MSQSNRELVVDFLSYKLSQKGYSWSQFSDVEENRTEAPEGTESEMETPSAINGNPSWHLADSPAVNGATGHSSSLDAREVIPMAAVKQALREAGDEFELRYRRAFSDLTSQLHITPGTAYQSFEQDTFVELYGNNAAAESRKGQERFNRWFLTGMTVAGVVLLGSLFSRKXPDTDHPLYPPTPFSAPPHPPSSRHCHQENHYMQPMPTCPSQGWAQIWSLAASFLEFITLL

SEQ ID NO: 74 - protein, 294 aa, Homo Sapiens
  misc_feature (234)..(234): Xaa can be any naturally occurring amino acid
MSQSNRELVVDFLSYKLSQKGYSWSQFSDVEENRTEAPEGTESEMETPSAINGNPSWHLADSPAVNGATGHSSSLDAREVIPMAAVKQALREAGDEFELRYRRAFSDLTSQLHITPGTAYQSFEQVVNELFRDGVNWGRIVAFFSFGGALCVESVDKEMQVLVSRIAAWMATYLNDHLEPWIQENGGWDTFVELYGNNAAAESRKGQERFNRWFLTGMTVAGVVLLGSLFSRKXPDTDHPLYPPTPFSAPPHPPSSRHCHQENHYMQPMPTCPSQGWAQIWSLAASFLEFITLL

SEQ ID NO: 75 - protein, 201 aa, Homo Sapiens
  misc_feature (194)..(194): Xaa can be any naturally occurring amino acid
MATPASAPDTRALVADFVGYKLRQKGYVCGAGPGEGPAADPLHQAMRAAGDEFETRFRRTFSDLAAQLHVTPGSAQQRFTQVSDELFQGGPNWGRLVAFFVFGAALCAESVNKEMEPLVGQVQEWMVAYLETRLADWIHSSGGWAEFTALYGDGALEEARRLREGNWASVRTVLTGAVALGALVTVGAFFASKXKSRARWG

SEQ ID NO: 76 - protein, 501 aa, Homo Sapiens
  misc_feature (447)..(447): Xaa can be any naturally occurring amino acid
MDEGPVDLRTRPKAAGLPGAALPLRKRPLRAPSPEPAAPRGAAGLVVPLDPLRGGCDLPAVPGPPHGLARPEALYYPGALLPLYPTRAMGSPFPLVNLPTPLYPMMCPMEHPLSADIAMATRADEDGDTPLHIAVVQGNLPAVHRLVNLFQQGGRELDIYNNLRQTPLHLAVITTLPSVVRLLVTAGASPMALDRHGQTAAHLACEHRSPTCLRALLDSAAPGTLDLEARNYDGLTALHVAVNTECQETVQLLLERGADIDAVDIKSGRSPLIHAVENNSLSMVQLLLQHGANVNAQMYSGSSALHSASGRGLLPLVRTLVRSGADSSLKNCHNDTPLMVARSRRVIDILRGKATRPASTSQPDPSPDRSANTSPESSSRLSSNGLLSASPSSSPSQSPPRDPPGFPMAPPNFFLPSPSPPAFLPFAGVLRGPGRPVPPSPAPGGSXGGWGGRSWTHEEGPPCPVGSTLLETVKISLCPPPPSSGPGFAQKHMHLPIHPLF

SEQ ID NO: 77 - protein, 253 aa, Homo Sapiens
  misc_feature (248)..(248): Xaa can be any naturally occurring amino acid
MTILFLTMVISYFGCMKAAPMKEANIRGQGGLAYPGVRTHGTLESVNGPKAGSRGLTSLADTFEHVIEELLDEDQKVRPNEENNKDADLYTSRVMLSSQVPLEPPLLFLLEEYKNYLDAANMSMRVRRHSDPARRGELSVCDSISEWVTAADKKTAVDMSGGTVTVLEKVPVSKGQLKQYFYETKCNPMGYTKEGCRGIDKRHWNSQCRTTQSYVRALTMDSKKRIGWRFIRIDTSCVCTLTIKRGRXWIYVV

SEQ ID NO: 78 - protein, 636 aa, Homo Sapiens
  misc_feature (619)..(619): Xaa can be any naturally occurring amino acid
MHKTASQRLFPGPSYQNIKSIMEDSTILSDWTNSNKQKMKYDFSCELYRMSTYSTFPAGVPVSERSLARAGFYYTGVNDKVKCFCCGLMLDNWKLGDSPIQKHKQLYPSCSFIQNLVSASLGSTSKNTSPMRNSFAHSLSPTLEHSSLFSGSYSSLSPNPLNSRAVEDISSSRTNPYSYAMSTEEARFLTYHMWPLTFLSPSELARAGFYYIGPGDRVACFACGGKLSNWEPKDDAMSEHRRHFPNCPFLENSLETLRFSISNLSMQTHAARMRTFMYWPSSVPVQPEQLASAGFYYVGRNDDVKCFCCDGGLRCWESGDDPWVEHAKWFPRCEFLIRMKGQEFVDEIQGRYPHLLEQLLSTSDTTGEENADPPIIHFGPGESSSEDAVMMNTPVVKSALEMGFNRDLVKQTVQSKILTTGENYKTVNDIVSALLNAEDEKREEEKEKQAEEMASDDLSLIRKNRMALFQQLTCVLPILDNLLKANVINKQEHDIIKQKTQIPLQARELIDTILVKGNAAANIFKNCLKEIDSTLYKNLFVDKNMKYIPTEDVSGLSLEEQLRRLQEERTCKVCMDKEVSVVFIPCGHLVVCQECAPSLRKCPICRGIIKGTVRTFLSXRKIVYILTCIKRSLKYC

SEQ ID NO: 79 - protein, 614 aa, Homo Sapiens
  misc_feature (605)..(605): Xaa can be any naturally occurring amino acid
MNIVENSIFLSNLMKSANTFELKYDLSCELYRMSTYSTFPAGVPVSERSLARAGFYYTGVNDKVKCFCCGLMLDNWKRGDSPTEKHKKLYPSCRFVQSLNSVNNLEATSQPTFPSSVTNSTHSLLPGTENSGYFRGSYSNSPSNPVNSRANQDFSALMRSSYHCAMNNENARLLTFQTWPLTFLSPTDLAKAGFYYIGPGDRVACFACGGKLSNWEPKDNAMSEHLRHFPKCPFIENQLQDTSRYTVSNLSMQTHAARFKTFFNWPSSVLVNPEQLASAGFYYVGNSDDVKCFCCDGGLRCWESGDDPWVQHAKWFPRCEYLIRIKGQEFIRQVQASYPHLLEQLLSTSDSPGDENAESSIIHFEPGEDHSEDAIMMNTPVINAAVEMGFSRSLVKQTVQRKILATGENYRLVNDLVLDLLNAEDEIREEERERATEEKESNDLLLIRKNRMALFQHLTCVIPILDSLLTAGIINEQEHDVIKQKTQTSLQARELIDTILVKGNIAATVFRNSLQEAEAVLYEHLFVQQDIKYIPTEDVSDLPVEEQLRRLQEERTCKVCMDKEVSIVFIPCGHLVVCKDCAPSLRKCPICRSTIKGTVRTFLSXRRTKTSSKL

SEQ ID NO: 80 - protein, 513 aa, Homo Sapiens
  misc_feature (498)..(498): Xaa can be any naturally occurring amino acid
MTFNSFEGSKTCVPADINKEEEFVEEFNRLKTFANFPSGSPVSASTLARAGFLYTGEGDTVRCFSCHAAVDRWQYGDSAVGRHRKVSPNCRFINGFYLENSATQSTNSGIQNGQYKVENYLGSRDHFALDRPSETHADYLLRTGQVVDISDTIYPRNPAMYSEEARLKSFQNWPDYAHLTPRELASAGLYYTGIGDQVQCFCCGGKLKNWEPCDRAWSEHRRHFPNCFFVLGRNLNIRSESDAVSSDRNFPNSTNLPRNPSMADYEARIFTFGTWIYSVNKEQLARAGFYALGEGDKVKCFHCGGGLTDWKPSEDPWEQHAKWYPGCKYLLEQKGQEYINNIHLTHSLEECLVRTTEKTPSLTRRIDDTIFQNPMVQEAIRMGFSFKDIKKIMEEKIQISGSNYKSLEVLVADLVNAQKDSMQDESSQTSLQKEISTEEQLRRLQEEKLCKICMDRNIAIVFVPCGHLVTCKQCAEAVDKCPMCYTVITFKQKIFMSXSNSIVGMLCCSYYPD

SEQ ID NO: 81 - protein, 468 aa, Homo Sapiens
  misc_feature (456)..(456): Xaa can be any naturally occurring amino acid
MSSSGLNSEKVAALIQKLNSDPQFVLAQNVGTTHDLLDICLKRATVQRAQHVFQHAVPQEGKPITNQKSSGRCWIFSCLNVMRLPFMKKLNIEEFEFSQSYLFFWDKVERCYFFLSAFVDTAQRKEPEDGRLVQFLLMNPANDGGQWDMLVNIVEKYGVIPKKCFPESYTTEATRRMNDILNHKMREFCIRLRNLVHSGATKGEISATQDVMMEEIFRVVCICLGNPPETFTWEYRDKDKNYQKIGPITPLEFYREHVKPLFNMEDKICLVNDPRPQHKYNKLYTVEYLSNMVGGRKTLYNNQPIDFLKKMVAASIKDGEAVWFGCDVGKHFNSKLGLSDMNLYDHELVFGVSLKNMNKAERLTFGESLMTHAMTFTAVSEKDDQDGAFTKWRVENSWGEDHGHKGYLCMTDEWFSEYVYEVVVDRKHVPEEVLAVLEQEPIILPAWDPMGALAEXYCPPALSSFHGT

SEQ ID NO: 82 - protein, 339 aa, Homo Sapiens
  misc_feature (327)..(327): Xaa can be any naturally occurring amino acid
MHRTTRIKITELNPHLMCVLCGGYFIDATTIIECLHSFCKTCIVRYLETSKYCPICDVQVHKTRPLLNIRSDKTLQDIVYKLVPGLFKNEMKRRRDFYAAHPSADAANGSNEDRGEVADEDKRIITDDEIISLSIEFFDQNRLDRKVNKDKEKSKEEVNDKRYLRCPAAMTVMHLRKFLRSKMDIPNTFQIDVMYEEEPLKDYYTLMDIAYIYTWRRNGPLPLKYRVRPTCKRMKISHQRDGLTNAGELESDSGSDKANSPAGGIPSTSSCLPSPSTPVQSPHPQFPHISSTMNGTSNSPSGNHQSSFANRPRKSSVNGSSATSSGXYLRLLRKKILNP

SEQ ID NO: 83 - protein, 449 aa, Homo Sapiens
  misc_feature (397)..(397): Xaa can be any naturally occurring amino acid
MVAGTRCLLALLLPQVLLGGAAGLVPELGRRKFAAASSGRPSSQPSDEVLSEFELRLLSMFGLKQRPTPSRDAVVPPYMLDLYRRHSGQPGSPAPDHRLERAASRANTVRSFHHEESLEELPETSGKTTRRFFFNLSSIPTEEFITSAELQVFREQMQDALGNNSSFHHRINIYEIIKPATANSKFPVTRLLDTRLVNQNASRWESFDVTPAVMRWTAQGHANHGFVVEVAHLEEKQGVSKRHVRISRSLHQDEHSWSQIRPLLVTFGHDGKGHPLHKREKRQAKHKQRKRLKSSCKRHPLYVDFSDVGWNDWIVAPPGYHAFYCHGECPFPLADHLNSTNHAIVQTLVNSVNSKIPKACCVPTELSAISMLYLDENEKVVLKNYQDMVVEGCGCRXYSKIKYINIYIYIYFRKKKKTNKQKNPTPVDTLIFPNEDFIYGMEWKKKQLF

SEQ ID NO: 84 - protein, 452 aa, Homo Sapiens
  misc_feature (409)..(409): Xaa can be any naturally occurring amino acid
MIPGNRMLMVVLLCQVLLGGASHASLIPETGKKKVAEIQGHAGGRRSGQSHELLRDFEATLLQMFGLRRRPQPSKSAVIPDYMRDLYRLQSGEEEEEQIHSTGLEYPERPASRANTVRSFHHEEHLENIPGTSENSAFRFLFNLSSIPENEVISSAELRLFREQVDQGPDWERGFHRINIYEVMKPPAEVVPGHLITRLLDTRLVHHNVTRWETFDVSPAVLRWTREKQPNYGLAIEVTHLHQTRTHQGQHVRISRSLPQGSGNWAQLRPLLVTFGHDGRGHALTRRRRAKRSPKHHSQRARKKNKNCRRHSLYVDFSDVGWNDWIVAPPGYQAFYCHGDCPFPLADHLNSTNHAIVQTLVNSVNSSIPKACCVPTELSAISMLYLDEYDKVVLKNYQEMVVEGCGCRXDQAVLEDRQIYTPHTHTTYTTHTRSHPLTHTLHRLLPYSWTFI

SEQ ID NO: 85 - protein, 232 aa, Homo Sapiens
  misc_feature (220)..(220): Xaa can be any naturally occurring amino acid
MSSHLVEPPPPLHNNNNNCEENEQSLPPPAGLNSSWVELPMNSSNGNDNGNGKNGGLEHVPSSSSIHNGDMEKILLDAQHESGQSSSRGSSHCDSPSPQEDGQIMFDVEMHTSRDHSSQSEEEVVEGEKEVEALKKSADWVSDWSSRPENIPPKEFHFRHPKRSVSLSMRKSGAMKKGGIFSAEFLKVFIPSLFLSHVLALGLGIYIGKRLSTPSASTYXGKGKAPGNACDL

SEQ ID NO: 86 - protein, 1902 aa, Homo Sapiens
  misc_feature (1864)..(1864): Xaa can be any naturally occurring amino acid
MDLSALRVEEVQNVINAMQKILECPICLELIKEPVSTKCDHIFCKFCMLKLLNQKKGPSQCPLCKNDITKRSLQESTRFSQLVEELLKIICAFQLDTGLEYANSYNFAKKENNSPEHLKDEVSIIQSMGYRNRAKRLLQSEPENPSLQETSLSVQLSNLGTVRTLRTKQRIQPQKTSVYIELGSDSSEDTVNKATYCSVGDQELLQITPQGTRDEISLDSAKKAACEFSETDVTNTEHHQPSNNDLNTTEKRAAERHPEKYQGSSVSNLHVEPCGTNTHASSLQHENSSLLLTKDRMNVEKAEFCNKSKQPGLARSQHNRWAGSKETCNDRRTPSTEKKVDLNADPLCERKEWNKQKLPCSENPRDTEDVPWITLNSSIQKVNEWFSRSDELLGSDDSHDGESESNAKVADVLDVLNEVDEYSGSSEKIDLLASDPHEALICKSERVHSKSVESNIEDKIFGKTYRKKASLPNLSHVTENLIIGAFVTEPQIIQERPLTNKLKRKRRPTSGLHPEDFIKKADLAVQKTPEMINQGTNQTEQNGQVMNITNSGHENKTKGDSIQNEKNPNPIESLEKESAFKTKAEPISSSISNMELELNIHNSKAPKKNRLRRKSSTRHIHALELVVSRNLSPPNCTELQIDSCSSSEEIKKKKYNQMPVRHSRNLQLMEGKEPATGAKKSNKPNEQTSKRHDSDTFPELKLTNAPGSFTKCSNTSELKEFVNPSLPREEKEEKLETVKVSNNAEDPKDLMLSGERVLQTERSVESSSISLVPGTDYGTQESISLLEVSTLGKAKTEPNKCVSQCAAFENPKGLIHGCSKDNRNDTEGFKYPLGHEVNHSRETSIEMEESELDAQYLQNTFKVSKRQSFAPFSNPGNAEEECATFSAHSGSLKKQSPKVTFECEQKEENQGKNESNIKPVQTVNITAGFPVVGQKDKPVDNAKCSIKGGSRFCLSSQFRGNETGLITPNKHGLLQNPYRIPPLFPIKSFVKTKCKKNLLEENFEEHSMSPEREMGNENIPSTVSTISRNNIRENVFKEASSSNINEVGSSTNEVGSSINEIGSSDENIQAELGRNRGPKLNAMLRLGVLQPEVYKQSLPGSNCKHPEIKKQEYEEVVQTVNTDFSPYLISDNLEQPMGSSHASQVCSETPDDLLDDGEIKEDTSFAENDIKESSAVFSKSVQKGELSRSPSPFTHTHLAQGYRRGAKKLESSEENLSSEDEELPCFQHLLFGKVNNIPSQSTRHSTVATECLSKNTEENLLSLKNSLNDCSNQVILAKASQEHHLSEETKCSASLFSSQCSELEDLTANTNTQDPFLIGSSKQMRHQSESQGVGLSDKELVSDDEERGTGLEENNQEEQSMDSNLGEAASGCESETSVSEDCSGLSSQSDILTTQQRDTMQHNLIKLQQEMAELEAVLEQHGSQPSNSYPSIISDSSALEDLRNPEQSTSEKAVLTSQKSSEYPISQNPEGLSADKFEVSADSSTSKNKEPGVERSSPSKCPSLDDRWYMHSCSGSLQNRNYPSQEELIKVVDVEEQQLEESGPHDLTETSYLPRQDLEGTPYLESGISLFSDDPESDPSEDRAPESARVGNIPSSTSALKVPQLKVAESAQSPAAAHTTDTAGYNAMEESVSREKPELTASTERVNKRMSMVVSGLTPEEFMLVYKFARKHHITLTNLITEETTHVVMKTDAEFVCERTLKYFLGIAGGKWVVSYFWVTQSIKERKMLNEHDFEVRGDVVNGRNHQGPKRARESQDRKIFRGLEICCYGPFTNMPTDQLEWMVQLCGASVVKELSSFTLGTGVHPIVVVQPDAWTEDNGFHAIGQMCEAPVVTREWVLDSVALYQCQELDTYLIPQIPHSHYXLQPATGTEPQDPKNELTKWPFQALGAPLTLQSFYCPGY

SEQ ID NO: 87 - protein, 3428 aa, Homo Sapiens
  misc_feature (3419)..(3419): Xaa can be any naturally occurring amino acid
MPIGSKERPTFFEIFKTRCNKADLGPISLNWFEELSSEAPPYNSEPAEESEHKNNNYEPNLFKTPQRKPSYNQLASTPIIFKEQGLTLPLYQSPVKELDKFKLDLGRNVPNSRHKSLRTVKTKMDQADDVSCPLLNSCLSESPVVLQCTHVTPQRDKSVVCGSLFHTPKFVKGRQTPKHISESLGAEVDPDMSWSSSLATPPTLSSTVLIVRNEEASETVFPHDTTANVKSYFSNHDESLKKNDRFIASVTDSENTNQREAASHGFGKTSGNSFKVNSCKDHIGKSMPNVLEDEVYETVVDTSEEDSFSLCFSKCRTKNLQKVRTSKTRKKIFHEANADECEKSKNQVKEKYSFVSEVEPNDTDPLDSNVANQKPFESGSDKISKEVVPSLACEWSQLTLSGLNGAQMEKIPLLHISSCDQNISEKDLLDTENKRKKDFLTSENSLPRISSLPKSEKPLNEETVVNKRDEEQHLESHTDCILAVKQAISGTSPVASSFQGIKKSIFRIRESPKETFNASFSGHMTDPNFKKETEASESGLEIHTVCSQKEDSLCPNLIDNGSWPATTTQNSVALKNAGLISTLKKKTNKFIYAIHDETSYKGKKIPKDQKSELINCSAQFEANAFEAPLTFANADSGLLHSSVKRSCSQNDSEEPTLSLTSSFGTILRKCSRNETCSNNTVISQDLDYKEAKCNKEKLQLFITPEADSLSCLQEGQCENDPKSKKVSDIKEEVLAAACHPVQHSKVEYSDTDFQSQKSLLYDHENASTLILTPTSKDVLSNLVMISRGKESYKMSDKLKGNNYESDVELTKNIPMEKNQDVCALNENYKNVELLPPEKYMRVASPSRKVQFNQNTNLRVIQKNQEETTSISKITVNPDSEELFSDNENNFVFQVANERNNLALGNTKELHETDLTCVNEPIFKNSTMVLYGDTGDKQATQVSIKKDLVYVLAEENKNSVKQHIKMTLGQDLKSDISLNIDKIPEKNNDYMNKWAGLLGPISNHSFGGSFRTASNKEIKLSEHNIKKSKMFFKDIEEQYPTSLACVEIVNTLALDNQKKLSKPQSINTVSAHLQSSVVVSDCKNSHITPQMLFSKQDFNSNHNLTPSQKAEITELSTILEESGSQFEFTQFRKPSYILQKSTFEVPENQMTILKTTSEECRDADLHVIMNAPSIGQVDSSKQFEGTVEIKRKFAGLLKNDCNKSASGYLTDENEVGFRGFYSAHGTKLNVSTEALQKAVKLFSDIENISEETSAEVHPISLSSSKCHDSVVSMFKIENHNDKTVSEKNNKCQLILQNNIEMTTGTFVEEITENYKRNTENEDNKYTAASRNSHNLEFDGSDSSKNDTVCIHKDETDLLFTDQHNICLKLSGQFMKEGNTQIKEDLSDLTFLEVAKAQEACHGNTSNKEQLTATKTEQNIKDFETSDTFFQTASGKNISVAKESFNKIVNFFDQKPEELHNFSLNSELHSDIRKNKMDILSYEETDIVKHKILKESVPVGTGNQLVTFQGQPERDEKIKEPTLLGFHTASGKKVKIAKESLDKVKNLFDEKEQGTSEITSFSHQWAKTLKYREACKDLELACETIEITAAPKCKEMQNSLNNDKNLVSIETVVPPKLLSDNLCRQTENLKTSKSIFLKVKVHENVEKETAKSPATCYTNQSPYSVIENSALAFYTSCSRKTSVSQTSLLEAKKWLREGIFDGQPERINTADYVGNYLYENNSNSTIAENDKNHLSEKQDTYLSNSSMSNSYSYHSDEVYNDSGYLSKNKLDSGIEPVLKNVEDQKNTSFSKVISNVKDANAYPQTVNEDICVEELVTSSSPCKNKNAAIKLSISNSNNFEVGPPAFRIASGKIVCVSHETIKKVKDIFTDSFSKVIKENNENKSKICQTKIMAGCYEALDDSEDILHNSLDNDECSTHSHKVFADIQSEEILQHNQNMSGLEKVSKISPCDVSLETSDICKCSIGKLHKSVSSANTCGIFSTASGKSVQVSDASLQNARQVFSEIEDSTKQVFSKVLFKSNEHSDQLTREENTAIRTPEHLISQKGFSYNVVNSSAFSGFSTASGKQVSILESSLHKVKGVLEEFDLIRTEHSLHYSPTSRQNVSKILPRVDKRNPEHCVNSEMEKTCSKEFKLSNNLNVEGGSSENNHSIKVSPYLSQFQQDKQQLVLGTKVSLVENIHVLGKEQASPKNVKMEIGKTETFSDVPVKTNIEVCSTYSKDSENYFETEAVEIAKAFMEDDELTDSKLPSHATHSLFTCPENEEMVLSNSRIGKRRGEPLILVGEPSIKRNLLNEFDRIIENQEKSLKASKSTPDGTIKDRRLFMHHVSLEPITCVPFRTTKERQEIQNPNFTAPGQEFLSKSHLYEHLTLEKSSSNLAVSGHPFYQVSATRNEKMRHLITTGRPTKVFVPPFKTKSHFHRVEQCVRNINLEENRQKQNIDGHGSDDSKNKINDNEIHQFNKNNSNQAAAVTFTKCEEEPLDLITSLQNARDIQDMRIKKKQRQRVFPQPGSLYLAKTSTLPRISLKAAVGGQVPSACSHKQLYTYGVSKHCIKINSKNAESFQFHTEDYFGKESLWTGKGIQLADGGWLIPSNDGKAGKEEFYRALCDTPGVDPKLISRIWVYNHYRWIIWKLAAMECAFPKEFANRCLSPERVLLQLKYRYDTEIDRSRRSAIKKIMERDDTAAKTLVLCVSDIISLSANISETSSNKTSSADTQKVAIIELTDGWYAVKAQLDPPLLAVLKNGRLTVGQKIILHGAELVGSPDACTPLEAPESLMLKISANSTRPARWYTKLGFFPDPRPFPLPLSSLFSDGGNVGCVDVIIQRAYPIQWMEKTSSGLYIFRNEREEEKEAAKYVEAQQKRLEALFTKIQEEFEEHEENTTKPYLPSRALTRQQVRALQDGAELYEAVKNAADPAYLEGYFSEEQLRALNNHRQMLNDKKQAQIQLEIRKAMESAEQKEQGLSRDVTTVWKLRIVSYSKKEKDSVILSIWRPSSDLYSLLTEGKRYRIYHLATSKSKSKSERANIQLAATKKTQYQQLPVSDEILFQIYQPREPLHFSKFLDPDFQPSCSEVDLIGFVVSVVKKTGLAPFVYLSDECYNLLAIKFWIDLNEDIIKPHMLIAASNLQWRPESKSGLLTLFAGDFSVFSASPKEGHFQETFNKMKNTVENIDILCNEAENKLMHILHANDPKWSTPTKDCTSGPYTAQIIPGTGNKLLMSSPNCEIYYQSPLSLCMAKRKSVSTPVSAQMTSKSCKGEKEIDDQKNCKKRRALDFLSRLPLPPPVSPICTFVSPAAQKAFQPPRSCGTKYETPIKKKELNSPQMTPFKKFNEISLLESNSIADEELALINTQALLSGSTGEKQFISVSESTRTAPTSSEDYLRLKRRCTTSLIKEQESSQASTEECEKNKQDTITTKKYIXAFAKATINY

SEQ ID NO: 88 - protein, 319 aa, Homo Sapiens
  misc_feature (247)..(247): Xaa can be any naturally occurring amino acid
MPVQPPSKDTEEMEAEGDSAAEMNGEEEESEEERSGSQTESEEESSEMDDEDYERRRSECVSEMLDLEKQFSELKEKLFRERLSQLRLRLEEVGAERAPEYTEPLGGLQRSLKIRIQVAGIYKGFCLDVIRNKYECELQGAKQHLESEKLLLYDTLQGELQERIQRLEEDRQSLDLSSEWWDDKLHARGSSRSWDSLPPSKRKKAPLVSGPYIVYMLQEIDILEDWTAIKKARAAVSPQKRKSDGPXPCCSQPGGPSEQLALHPGFSSSSCRQADPQAPQGLPSQAPVVLLGPPTPSGTGLDSSSALLEACTAVAVELT

SEQ ID NO: 89 - protein, 200 aa, Homo Sapiens
  misc_feature (159)..(159): Xaa can be any naturally occurring amino acid
MSHGKGTDMLPEIAAAVGFLSSLLRTRGCVSEQRLKVFSGALQEALTEHYKHHWFPEKPSKGSGYRCIRINHKMDPIISRVASQIGLSQPQLHQLLPSELTLWVDPYEVSYRIGEDGSICVLYEEAPLAASCGLLTCKNQVLLGRSSPSKNYVMAVSSXALPPPPWAPPCSCCRDNRPPHTSTWGTVFLNEELFIYIIFF

SEQ ID NO: 90 - protein, 680 aa, Homo Sapiens
  misc_feature (658)..(658): Xaa can be any naturally occurring amino acid
MGEEDYYLELCERPVQFEKANPVNCVFFDEANKQVFAVRSGGATGVVVKGPDDRNPISFRMDDKGEVKCIKFSLENKILAVQRTSKTVDFCNFIPDNSQLEYTQECKTKNANILGFCWTSSTEIVFITDQGIEFYQVLPEKRSLKLLKSHNLNVNWYMYCPESAVILLSTTVLENVLQPFHFRAGTMSKLPKFEIELPAAPKSTKPSLSERDIAMATIYGQLYVLFLRHHSRTSNSTGAEVVLYHLPREGACKKMHILKLNRTGKFALNVVDNLVVVHHQDTETSVIFDIKLRGEFDGSVTFHHPVLPARSIQPYQIPITGPAAVTSQSPVPCKLYSSSWIVFQPDIIISASQGYLWNLQVKLEPIVNLLPDKGRLMDFLLQRKECKMVILSVCSQMLSESDRASLPVIATVFDKLNHEYKKYLDAEQSYAMAVEAGQSRSSPLLKRPVRTQAVLDQSDVYTHVLSAFVEKKEMPHKFVIAVLMEYIRSLNQFQIAVQHYLHELVIKTLVQHNLFYMLHQFLQYHVLSDSKPLACLLLSLESFYPPAHQLSLDMLKRLSTANDEIVEVLLSKHQVLAALRFIRGIGGHDNISARKFLDAAKQTEDNMLFYTIFRFFEQRNQRLRGSPNFTPGEHCEEHVAFFKQIFGDQALMRPTTFXNHLLFFYIKMCTKLIYCINKAL

SEQ ID NO: 91 - protein, 304 aa, Homo Sapiens
  misc_feature (283)..(283): Xaa can be any naturally occurring amino acid
MLPLLRCVPRVLGSSVAGLRAAAPASPFRQLLQPAPRLCTRPFGLLSVRAGSERRPGLLRPRGPCACGCGCGSLHTDGDKAFVDFLSDEIKEERKIQKHKTLPKMSGGWELELNGTEAKLVRKVAGEKITVTFNINNSIPPTFDGEEEPSQGQKVEEQEPELTSTPNFVVEVIKNDDGKKALVLDCHYPEDEVGQEDEAESDIFSIREVSFQSTGESEWKDTNYTLNTDSLDWALYDHLMDFLADRGVDNTFADELVELSTALEHQEYITFLEDLKSFVKSQXSRQMLKAIVSWQALASEQILL

SEQ ID NO: 92 - protein, 301 aa, Homo Sapiens
  misc_feature (291)..(291): Xaa can be any naturally occurring amino acid
MADLSFIEDTVAFPEKEEDEEEEEEGVEWGYEEGVEWGLVFPDANGEYQSPINLNSREARYDPSLLDVRLSPNYVVCRDCEVTNDGHTIQVILKSKSVLSGGPLPQGHEFELYEVRFHWGRENQRGSEHTVNFKAFPMELHLIHWNSTLFGSIDEAVGKPHGIAIIALFVQIGKEHVGLKAVTEILQDIQYKGKSKTIPCFNPNTLLPDPLLRDYWVYEGSLTIPPCSEGVTWILFRYPLTISQLQIEEFRRLRTHVKGAELVEGCDGILGDNFRPTQPLSDRVIRAAFQXPKRTGTSLSS

SEQ ID NO: 93 - protein, 165 aa, Homo Sapiens
  misc_feature (150)..(150): Xaa can be any naturally occurring amino acid
MADQLTEEQIAEFKEAFSLFDKDGDGTITTKELGTVMRSLGQNPTEAELQDMINEVDADGNGTIDFPEFLTMMARKMKDTDSEEEIREAFRVFDKDGNGYISAAELRHVMTNLGEKLTDEEVDEMIREADIDGDGQVNYEEFVQMMTAKXRPTFNSFFPPLEESN

SEQ ID NO: 94 - protein, 175 aa, Homo Sapiens
  misc_feature (150)..(150): Xaa can be any naturally occurring amino acid
MADQLTEEQIAEFKEAFSLFDKDGDGTITTKELGTVMRSLGQNPTEAELQDMINEVDADGNGTIDFPEFLTMMARKMKDTDSEEEIREAFRVFDKDGNGYISAAELRHVMTNLGEKLTDEEVDEMIREADIDGDGQVNYEEFVQMMTAKXRPCTECVKFLVQNCLFAFSLFVTYL

SEQ ID NO: 95 - protein, 186 aa, Homo Sapiens
  misc_feature (150)..(150): Xaa can be any naturally occurring amino acid
MADQLTEEQIAEFKEAFSLFDKDGDGTITTKELGTVMRSLGQNPTEAELQDMINEVDADGNGTIDFPEFLTMMARKMKDTDSEEEIREAFRVFDKDGNGYISAAELRHVMTNLGEKLTDEEVDEMIREADIDGDGQVNYEEFVQMMTAKXRPPGQLAMPVLLISLFSRAHSLFNTPLRTPVLANTN

SEQ ID NO: 96 - protein, 620 aa, Homo Sapiens
  misc_feature (593)..(593): Xaa can be any naturally occurring amino acid
MEGKWLLCMLLVLGTAIVEAHDGHDDDVIDIEDDLDDVIEEVEDSKPDTTAPPSSPKVTYKAPVPTGEVYFADSFDRGTLSGWILSKAKKDDTDDEIAKYDGKWEVEEMKESKLPGDKGLVLMSRAKHHAISAKLNKPFLFDTKPLIVQYEVNFQNGIECGGAYVKLLSKTPELNLDQFHDKTPYTIMFGPDKCGEDYKLHFIFRHKNPKTGIYEEKHAKRPDADLKTYFTDKKTHLYTLILNPDNSFEILVDQSVVNSGNLLNDMTPPVNPSREIEDPEDRKPEDWDERPKIPDPEAVKPDDWDEDAPAKIPDEEATKPEGWLDDEPEYVPDPDAEKPEDWDEDMDGEWEAPQIANPRCESAPGCGVWQRPVIDNPNYKGKWKPPMIDNPSYQGIWKPRKIPNPDFFEDLEPFRMTPFSAIGLELWSMTSDIFFDNFIICADRRIVDDWANDGWGLKKAADGAAEPGVVGQMIEAAEERPWLWVVYILTVALPVFLVILFCCSGKKQTSGMEYKKTDAPQPDVKEEEEEKEEEKDKGDEEEEGEEKLEEKQKSDAEEDGGTVSQEEEDRKPKAEEDEILNRSPRNRKPRREXNNLKSLICDFFSLLPCKSGPRRGPGTP

SEQ ID NO: 97 - protein, 649 aa, Homo Sapiens
  misc_feature (642)..(642): Xaa can be any naturally occurring amino acid
MGPPLKLFKNQKYQELKQECIKDSRLFCDPTFLPENDSLFYNRLLPGKVVWKRPQDICDDPHLIVGNISNHQLTQGRLGHKPMVSAFSCLAVQESHWTKTIPNHKEQEWDPQKTEKYAGIFHFRFWHFGEWTEVVIDDLLPTINGDLVFSFSTSMNEFWNALLEKAYAKLLGCYEALDGLTITDIIVDFTGTLAETVDMQKGRYTELVEEKYKLFGELYKTFTKGGLICCSIESPNQEEQEVETDWGLLKGHTYTMTDIRKIRLGERLVEVFSAEKVYMVRLRNPLGRQEWSGPWSEISEEWQQLTASDRKNLGLVMSDDGEFWMSLEDFCRNFHKLNVCRNVNNPIFGRKELESVLGCWTVDDDPLMNRSGGCYNNRDTFLQNPQYIFTVPEDGHKVIMSLQQKDLRTYRRMGRPDNYIIGFELFKVEMNRKFRLHHLYIQERAGTSTYIDTRTVFLSKYLKKGNYVLVPTMFQHGRTSEFLLRIFSEVPVQLRELTLDMPKMSCWNLARGYPKVVTQITVHSAEDLEKKYANETVNPYLVIKCGKEEVRSPVQKNTVHAIFDTQAIFYRRTTDIPIIVQVWNSRKFCDQFLGQVTLDADPSDCRDLKSLYLRKKGGPTAKVKQGHISFKVISSDDLTELXICNPRES

SEQ ID NO: 98 - protein, 716 aa, Homo Sapiens
  misc_feature (704)..(704): Xaa can be any naturally occurring amino acid
MADRRRQRASQDTEDEESGASGSDSGGSPLRGGGSCSGSAGGGGSGSLPSQRGGRTGALHLRRVESGGAKSAEESECESEDGIEGDAVLSDYESAEDSEGEEGEYSEEENSKVELKSEANDAVNSSTKEEKGEEKPDTKSTVTGERQSGDGQESTEPVENKVGKKGPKHLDDDEDRKNPAYIPRKGLFFEHDLRGQTQEEEVRPKGRQRKLWKDEGRWEHDKFREDEQAPKSRQELIALYGYDIRSAHNPDDIKPRRIRKPRYGSPPQRDPNWNGERLNKSHRHQGLGGTLPPRTFINRNAAGTGRMSAPRNYSRSGGFKEGRAGFRPVEAGGQHGGRSGETVKHEISYRSRRLEQTSVRDPSPEADAPVLGSPEKEEAASEPPAAAPDAAPPPPDRPIEKKSYSRARRTRTKVGDAVKLAEEVPPPPEGLIPAPPVPETTPTPPTKTGTWEAPVDSSTSGLEQDVAQLNIAEQNWSPGQPSFLQPRELRGMPNHIHMGAGPPPQFNRMEEMGVQGGRAKRYSSQRQRPVPEPPAPPVHISIMEGHYYDPLQFQGPIYTHGDSPAPLPPQGMLVQPGMNLPHPGLHPHQTPAPLPNPGLYPPPVSMSPGQPPPQQLLAPTYFSAPGVMNFGNPSYPYAPGALPPPPPPHLYPNTQAPSQVYGGVTYYNPAQQQVQPKPSPPRRTPQPVTIKPPPPEVVSRGSSXYKFLNILNLNII

SEQ ID NO: 99 - protein, 389 aa, Homo Sapiens
  misc_feature (384)..(384): Xaa can be any naturally occurring amino acid
MADKVLKEKRKLFIRSMGEGTINGLLDELLQTRVLNKEEMEKVKRENATVMDKTRALIDSVIPKGAQACQICITYICEEDSYLAGTLGLSAAPQAVQDNPAMPTSSGSEGNVKLCSLEEAQRIWKQKSAEIYPIMDKSSRTRLALIICNEEFDSIPRRTGAEVDITGMTMLLQNLGYSVDVKKNLTASDMTTELEAFAHRPEHKTSDSTFLVFMSHGIREGICGKKHSEQVPDILQLNAIFNMLNTKNCPSLKDKPKVIIIQACRGDSPGVVWFKDSVGVSGNLSLPTTEEFEDDAIKKAHIEKDFIAFCSSTPDNVSWRHPTMGSVFIGRLIEHMQEYACSCDVEEIFRKVRFSFEQPDGRAQMPTTERVTLTRCFYLFPGHXNKETV

SEQ ID NO: 100 - protein, 410 aa, Homo Sapiens
  misc_feature (405)..(405): Xaa can be any naturally occurring amino acid
MADKVLKEKRKLFIRSMGEGTINGLLDELLQTRVLNKEEMEKVKRENATVMDKTRALIDSVIPKGAQACQICITYICEEDSYLAGTLGLSADQTSGNYLNMQDSQGVLSSFPAPQAVQDNPAMPTSSGSEGNVKLCSLEEAQRIWKQKSAEIYPIMDKSSRTRLALIICNEEFDSIPRRTGAEVDITGMTMLLQNLGYSVDVKKNLTASDMTTELEAFAHRPEHKTSDSTFLVFMSHGIREGICGKKHSEQVPDILQLNAIFNMLNTKNCPSLKDKPKVIIIQACRGDSPGVVWFKDSVGVSGNLSLPTTEEFEDDAIKKAHIEKDFIAFCSSTPDNVSWRHPTMGSVFIGRLIEHMQEYACSCDVEEIFRKVRFSFEQPDGRAQMPTTERVTLTRCFYLFPGHXNKETV

SEQ ID NO: 101 - protein, 317 aa, Homo Sapiens
  misc_feature (312)..(312): Xaa can be any naturally occurring amino acid
MADKVLKEKRKLFIRSMGEAPQAVQDNPAMPTSSGSEGNVKLCSLEEAQRIWKQKSAEIYPIMDKSSRTRLALIICNEEFDSIPRRTGAEVDITGMTMLLQNLGYSVDVKKNLTASDMTTELEAFAHRPEHKTSDSTFLVFMSHGIREGICGKKHSEQVPDILQLNAIFNMLNTKNCPSLKDKPKVIIIQACRGDSPGVVWFKDSVGVSGNLSLPTTEEFEDDAIKKAHIEKDFIAFCSSTPDNVSWRHPTMGSVFIGRLIEHMQEYACSCDVEEIFRKVRFSFEQPDGRAQMPTTERVTLTRCFYLFPGHXNKETV

SEQ ID NO: 102 - protein, 269 aa, Homo Sapiens
  misc_feature (264)..(264): Xaa can be any naturally occurring amino acid
MADKVLKEKRKLFIRSMGEAPQAVQDNPAMPTSSGSEGNVKLCSLEEAQRIWKQKSAEIYPIMDKSSRTRLALIICNEEFDSIPRRTGAEVDITGMTMLLQNLGYSVDVKKNLTASDMTTELEAFAHRPEHKTSDSTFLVFMSHGIREGICGKKHSEQVPDILQLNAIFNMLNTKNCPSLKDKPKVIIIQACRGDNVSWRHPTMGSVFIGRLIEHMQEYACSCDVEEIFRKVRFSFEQPDGRAQMPTTERVTLTRCFYLFPGHXNKETV

SEQ ID NO: 103 - protein, 94 aa, Homo Sapiens
  misc_feature (89)..(89): Xaa can be any naturally occurring amino acid
MADKVLKEKRKLFIRSMGEDNVSWRHPTMGSVFIGRLIEHMQEYACSCDVEEIFRKVRFSFEQPDGRAQMPTTERVTLTRCFYLFPGHXNKETV

SEQ ID NO: 104 - protein, 537 aa, Homo Sapiens
  misc_feature (453)..(453): Xaa can be any naturally occurring amino acid
MAAPSAGSWSTFQHKELMAADRGRRILGVCGMHPHHQETLKKNRVVLAKQLLLSELLEHLLEKDIITLEMRELIQAKVGSFSQNVELLNLLPKRGPQAFDAFCEALRETKQGHLEDMLLTTLSGLQHVLPPLSCDYDLSLPFPVCESCPLYKKLRLSTDTVEHSLDNKDGPVCLQVKPCTPEFYQTHFQLAYRLQSRPRGLALVLSNVHFTGEKELEFRSGGDVDHSTLVTLFKLLGYDVHVLCDQTAQEMQEKLQNFAQLPAHRVTDSCIVALLSHGVEGAIYGVDGKLLQLQEVFQLFDNANCPSLQNKPKMFFIQACRGDETDRGVDQQDGKNHAGSPGCEESDAGKEKLPKMRLPTRSDMICGYACLKGTAAMRNTKRGSWYIEALAQVFSERACDMHVADMLVKVNALIKDREGYAPGTEFHRCKEMSEYCSTLCRHLYLFPGHPPTXCHLPIIHAKWKPLDHRRCDRAFDLQDARFLFCPLRDVGISQTCFLCPSSLPLSVGLQASSFSVKPFACRASLGWTYCQECFSCS

SEQ ID NO: 105 - protein, 292 aa, Homo Sapiens
  misc_feature (278)..(278): Xaa can be any naturally occurring amino acid
MENTENSVDSKSIKNLEPKIIHGSESMDSGISLDNSYKMDYPEMGLCIIINNKNFHKSTGMTSRSGTDVDAANLRETFRNLKYEVRNKNDLTREEIVELMRDVSKEDHSKRSSFVCVLLSHGEEGIIFGTNGPVDLKKITNFFRGDRCRSLTGKPKLFIIQACRGTELDCGIETDSGVDDDMACHKIPVEADFLYAYSTAPGYYSWRNSKDGSWFIQSLCAMLKQYADKLEFMHILTRVNRKVATEFESFSFDATFHAKKQIPCIVSMLTKELYFYHXRNGWLVVFFSLYAK

SEQ ID NO: 106 - protein, 397 aa, Homo Sapiens
  misc_feature (378)..(378): Xaa can be any naturally occurring amino acid
MAEGNHRKKPLKVLESLGKDFLTGVLDNLVEQNVLNWKEEEKKKYYDAKTEDKVRVMADSMQEKQRMAGQMLLQTFFNIDQISPNKKAHPNMEAGPPESGESTDALKLCPHEEFLRLCKERAEEIYPIKERNNRTRLALIICNTEFDHLPPRNGADFDITGMKELLEGLDYSVDVEENLTARDMESALRAFATRPEHKSSDSTFLVLMSHGILEGICGTVHDEKKPDVLLYDTIFQIFNNRNCLSLKDKPKVIIVQACRGANRGELWVRDSPASLEVASSQSSENLEEDAVYKTHVEKDFIAFCSSTPHNVSWRDSTMGSIFITQLITCFQKYSWCCHLEEVFRKVQQSFETPRAKAQMPTIERLSMTRYFYLFPGNXKWKPQAAQPSLINFKEHLH

SEQ ID NO: 107 - protein, 299 aa, Homo Sapiens
  misc_feature (294)..(294): Xaa can be any naturally occurring amino acid
MSSASGLRRGHPAGGEENMTETDAFYKREMFDPAEKYKMDHRRRGIALIFNHERFFWHLTLPERRGTCADRDNLTRRFSDLGFEVKCFNDLKAEELLLKIHEVSTVSHADADCFVCVFLSHGEGNHIYAYDAKIEIQTLTGLFKGDKCHSLVGKPKIFIIQACRGNQHDVPVIPLDVVDNQTEKLDTNITEVDAASVYTLPAGADFLMCYSVAEGYYSHRETVNGSWYIQDLCEMLGKYGSSLEFTELLTLVNRKVSQRRVDFCKDPSAIGKKQVPCFASMLTKKLHFFPKSNXLIEAI

SEQ ID NO: 108 - protein, 210 aa, Homo Sapiens
  misc_feature (205)..(205): Xaa can be any naturally occurring amino acid
MSSASGLRRGHPAVSTVSHADADCFVCVFLSHGEGNHIYAYDAKIEIQTLTGLFKGDKCHSLVGKPKIFIIQACRGNQHDVPVIPLDVVDNQTEKLDTNITEVDAASVYTLPAGADFLMCYSVAEGYYSHRETVNGSWYIQDLCEMLGKYGSSLEFTELLTLVNRKVSQRRVDFCKDPSAIGKKQVPCFASMLTKKLHFFPKSNXLIEAI

SEQ ID NO: 109 - protein, 352 aa, Homo Sapiens
  misc_feature (337)..(337): Xaa can be any naturally occurring amino acid
MDCVGWPPGRKWHLEKNTSCGGSSGICASYVTQMADDQGCIEEQGVEDSANEDSVDAKPDRSSFVPSLFSKKKKNVTMRSIKTTRDRVPTYQYNMNFEKLGKCIIINNKNFDKVTGMGVRNGTDKDAEALFKCFRSLGFDVIVYNDCSCAKMQDLLKKASEEDHTNAACFACILLSHGEENVIYGKDGVTPIKDLTAHFRGDRCKTLLEKPKLFFIQACRGTELDDGIQADSGPINDTDANPRYKIPVEADFLFAYSTVPGYYSWRSPGRGSWFVQALCSILEEHGKDLEIMQILTRVNDRVARHFESQSDDPHFHEKKQIPCVVSMLTKELYFSQXPYQGYILAEKQWVTH

SEQ ID NO: 110 - protein, 319 aa, Homo Sapiens
  misc_feature (304)..(304): Xaa can be any naturally occurring amino acid
MADDQGCIEEQGVEDSANEDSVDAKPDRSSFVPSLFSKKKKNVTMRSIKTTRDRVPTYQYNMNFEKLGKCIIINNKNFDKVTGMGVRNGTDKDAEALFKCFRSLGFDVIVYNDCSCAKMQDLLKKASEEDHTNAACFACILLSHGEENVIYGKDGVTPIKDLTAHFRGDRCKTLLEKPKLFFIQACRGTELDDGIQADSGPINDTDANPRYKIPVEADFLFAYSTVPGYYSWRSPGRGSWFVQALCSILEEHGKDLEIMQILTRVNDRVARHFESQSDDPHFHEKKQIPCVVSMLTKELYFSQXPYQGYILAEKQWVTH

SEQ ID NO: 111 - protein, 299 aa, Homo Sapiens
  misc_feature (254)..(254): Xaa can be any naturally occurring amino acid
MADDQGCIEEQGVEDSANEDSVDAKPDRSSFVPSLFSKKKKNVTMRSIKTTRDRVPTYQYNMNFEKLGKCIIINNKNFDKVTGMGVRNGTDKDAEALFKCFRSLGFDVIVYNDCSCAKMQDLLKKASEEDHTNAACFACILLSHGEENMESCSVTQAGVQRRDLGRLQPPPPRLAEGPSLMMASRPTRGPSMTQMLILDTRSQWKLTSSSPIPRFQAITRGGAQEEAPGLCKPSAPSWRSTEKTWKSCRSSPGXMTELPGTLSLSLMTHTSMRRSRSPVWSPCSPRNSTSVNSHIRGTF

SEQ ID NO: 112 - protein, 584 aa, Homo Sapiens
  misc_feature (497)..(497): Xaa can be any naturally occurring amino acid
MDFSRNLYDIGEQLDSEDLASLKFLSLDYIPQRKQEPIKDALMLFQRLQEKRMLEESNLSFLKELLFRINRLDLLITYLNTRKEEMERELQTPGRAQISAYRFHFCRMSWAEANSQCQTQSVPFWRRVDHLLIRVMLYQISEEVSRSELRSFKFLLQEEISKCKLDDDMNLLDIFIEMEKRVILGEGKLDILKRVCAQINKSLLKIINDYEEFSKGEELCGVMTISDSPREQDSESQTLDKVYQMKSKPRGYCLIINNHNFAKAREKVPKLHSIRDRNGTHLDAGALTTTFEELHFEIKPHDDCTVEQIYEILKIYQLMDHSNMDCFICCILSHGDKGIIYGTDGQEAPIYELTSQFTGLKCPSLAGKPKVFFIQACQGDNYQKGIPVETDSEEQPYLEMDLSSPQTRYIPDEADFLLGMATVNNCVSYRNPAEGTWYIQSLCQSLRERCPRGDDILTILTEVNYEVSNKDDKKNMGKQMPQPTFTLRKKLVFPSDXWCYFVCFVLFCFFETESRSVAQAGVQWRDLGSPQAPPPGFRPFSCLSLPSSWDYRGPPPHLANFLKIFLVETGFHCVSQGGLDLLTS

SEQ ID NO: 113 - protein, 567 aa, Homo Sapiens
  misc_feature (480)..(480): Xaa can be any naturally occurring amino acid
MDFSRNLYDIGEQLDSEDLASLKFLSLDYIPQRKQEPIKDALMLFQRLQEKRMLEESNLSFLKELLFRINRLDLLITYLNTRKEEMERELQTPGRAQISAYRVMLYQISEEVSRSELRSFKFLLQEEISKCKLDDDMNLLDIFIEMEKRVILGEGKLDILKRVCAQINKSLLKIINDYEEFSKERSSSLEGSPDEFSNGEELCGVMTISDSPREQDSESQTLDKVYQMKSKPRGYCLIINNHNFAKAREKVPKLHSIRDRNGTHLDAGALTTTFEELHFEIKPHDDCTVEQIYEILKIYQLMDHSNMDCFICCILSHGDKGIIYGTDGQEAPIYELTSQFTGLKCPSLAGKPKVFFIQACQGDNYQKGIPVETDSEEQPYLEMDLSSPQTRYIPDEADFLLGMATVNNCVSYRNPAEGTWYIQSLCQSLRERCPRGDDILTILTEVNYEVSNKDDKKNMGKQMPQPTFTLRKKLVFPSDXWCYFVCFVLFCFFETESRSVAQAGVQWRDLGSPQAPPPGFRPFSCLSLPSSWDYRGPPPHLANFLKIFLVETGFHCVSQGGLDLLTS

SEQ ID NO: 114 - protein, 552 aa, Homo Sapiens
  misc_feature (465)..(465): Xaa can be any naturally occurring amino acid
MDFSRNLYDIGEQLDSEDLASLKFLSLDYIPQRKQEPIKDALMLFQRLQEKRMLEESNLSFLKELLFRINRLDLLITYLNTRKEEMERELQTPGRAQISAYRVMLYQISEEVSRSELRSFKFLLQEEISKCKLDDDMNLLDIFIEMEKRVILGEGKLDILKRVCAQINKSLLKIINDYEEFSKGEELCGVMTISDSPREQDSESQTLDKVYQMKSKPRGYCLIINNHNFAKAREKVPKLHSIRDRNGTHLDAGALTTTFEELHFEIKPHDDCTVEQIYEILKIYQLMDHSNMDCFICCILSHGDKGIIYGTDGQEAPIYELTSQFTGLKCPSLAGKPKVFFIQACQGDNYQKGIPVETDSEEQPYLEMDLSSPQTRYIPDEADFLLGMATVNNCVSYRNPAEGTWYIQSLCQSLRERCPRGDDILTILTEVNYEVSNKDDKKNMGKQMPQPTFTLRKKLVFPSDXWCYFVCFVLFCFFETESRSVAQAGVQWRDLGSPQAPPPGFRPFSCLSLPSSWDYRGPPPHLANFLKIFLVETGFHCVSQGGLDLLTS

SEQ ID NO: 115 - protein, 247 aa, Homo Sapiens
  misc_feature (236)..(236): Xaa can be any naturally occurring amino acid
MDFSRNLYDIGEQLDSEDLASLKFLSLDYIPQRKQEPIKDALMLFQRLQEKRMLEESNLSFLKELLFRINRLDLLITYLNTRKEEMERELQTPGRAQISAYRVMLYQISEEVSRSELRSFKFLLQEEISKCKLDDDMNLLDIFIEMEKRVILGEGKLDILKRVCAQINKSLLKIINDYEEFSKERSSSLEGSPDEFSNDFGQSLPNEKQTSGILSDHQQSQFCKSTGESAQTSQHXGQEWNTLGCRV

SEQ ID NO: 116 - protein, 436 aa, Homo Sapiens
  misc_feature (417)..(417): Xaa can be any naturally occurring amino acid
MDEADRRLLRRCRLRLVEELQVDQLWDALLSRELFRPHMIEDIQRAGSGSRRDQARQLIIDLETRGSQALPLFISCLEDTGQDMLASFLRTNRQAAKLSKPTLENLTPVVLRPEIRKPEVLRPETPRPVDIGSGGFGDVGALESLRGNADLAYILSMEPCGHCLIINNVNFCRESGLRTRTGSNIDCEKLRRRFSSLHFMVEVKGDLTAKKMVLALLELAQQDHGALDCCVVVILSHGCQASHLQFPGAVYGTDGCPVSVEKIVNIFNGTSCPSLGGKPKLFFIQACGGEQKDHGFEVASTSPEDESPGSNPEPDATPFQEGLRTFDQLDAISSLPTPSDIFVSYSTFPGFVSWRDPKSGSWYVETLDDIFEQWAHSEDLQSLLLRVANAVSVKGIYKQMPGCFNFLRKKLFFKTSXGQGPSPCLILHPKAFLPQA

SEQ ID NO: 117 - protein, 286 aa, Homo Sapiens
  misc_feature (267)..(267): Xaa can be any naturally occurring amino acid
MDEADRRLLRRCRLRLVEELQVDQLWDALLSRELFRPHMIEDIQRAGSGSRRDQARQLIIDLETRGSQALPLFISCLEDTGQDMLASFLRTNRQAAKLSKPTLENLTPVVLRPEIRKPEVLRPETPRPVDIGSGGFGDVEQKDHGFEVASTSPEDESPGSNPEPDATPFQEGLRTFDQLDAISSLPTPSDIFVSYSTFPGFVSWRDPKSGSWYVETLDDIFEQWAHSEDLQSLLLRVANAVSVKGIYKQMPGCFNFLRKKLFFKTSXGQGPSPCLILHPKAFLPQA

SEQ ID NO: 118 - protein, 184 aa, Homo Sapiens
  misc_feature (179)..(179): Xaa can be any naturally occurring amino acid
MSGGKYVDSEGHLYTVPIREQGNIYKPNNKAMADELSEKQVYDAHTKEIDLVNRDPKHLNDDVVKIDFEDVIAEPEGTHSFDGIWKASFTTFTVTKYWFYRLLSALFGIPMALIWGIYFAILSFLHIWAVVPCIKSFLIEIQCISRVYSIYVHTVCDPLFEAVGKIFSNVRINLQKEIXMTFQG

SEQ ID NO: 119 - protein, 460 aa, Homo Sapiens
  misc_feature (448)..(448): Xaa can be any naturally occurring amino acid
MELLKLNRSVQGTGPGPGASLCRPGAPLLNSSSVGNLSCEPPRIRGAGTRELELAIRITLYAVIFLMSVGGNMLIIVVLGLSRRLRTVTNAFLLSLAVSDLLLAVACMPFTLLPNLMGTFIFGTVICKAVSYLMGVSVSVSTLSLVAIALERYSAICRPLQARVWQTRSHAARVIVATWLLSGLLMVPYPVYTVVQPVGPRVLQCVHRWPSARVRQTWSVLLLLLLFFIPGVVMAVAYGLISRELYLGLRFDGDSDSDSQSRVRNQGGLPGAVHQNGRCRPETGAVGEDSDGCYVQLPRSRPALELTALTAPGPGSGSRPTQAKLLAKKRVVRMLLVIVVLFFLCWLPVYSANTWRAFDGPGAHRALSGAPISFIHLLSYASACVNPLVYCFMHRRFRQACLETCARCCPRPPRARPRALPDEDPPTPSIASLSRLSYTTISTLGPGXGVEGPWGLRQGK

SEQ ID NO: 120 - protein, 124 aa, Homo Sapiens
  misc_feature (98)..(98): Xaa can be any naturally occurring amino acid
MKVSAALLWLLLIAAAFSPQGLAGPASVPTTCCFNLANRKIPLQRLESYRRITSGKCPQKAVIFKTKLAKDICADPKKKWVQDSMKYLDQKSPTPKPXIITIFETKPEPECCLICFPFLQCILR

SEQ ID NO: 121 - protein, 111 aa, Homo Sapiens
  misc_feature (99)..(99): Xaa can be any naturally occurring amino acid
MKVSAVLLCLLLMTAAFNPQGLAQPDALNVPSTCCFTFSSKKISLQRLKSYVITTSRCPQKAVIFRTKLGKEICADPKEKWVQNYMKHLGRKAHTLKTXTLLPLLKSSWST

SEQ ID NO: 122 - protein, 124 aa, Homo Sapiens
  misc_feature (90)..(90): Xaa can be any naturally occurring amino acid
MKGLAAALLVLVCTMALCSCAQVGTNKELCCLVYTSWQIPQKFIVDYSETSPQCPKPGVILLTKRGRQICADPNKKWVQKYISDLKLNAXGAWKLRGPSELGGPRREQEPEPGQWPCHPGGHLF

SEQ ID NO: 123 - protein, 138 aa, Homo Sapiens
  misc_feature (99)..(99): Xaa can be any naturally occurring amino acid
MALLLALSLLVLWTSPAPTLSGTNDAEDCCLSVTQKPIPGYIVRNFHYLLIKDGCRVPAVVFTTLRGRQLCAPPDQPWVERIIQRLQRTSAKMKRRSSXPMTVQREPGVRVKHCELLPNLGNRGPEGRTRLPAPLHQT

SEQ ID NO: 124 - protein, 154 aa, Homo Sapiens
  misc_feature (135)..(135): Xaa can be any naturally occurring amino acid
MAQSLALSLLILVLAFGIPRTQGSDGGAQDCCLKYSQRKIPAKVVRSYRKQEPSLGCSIPAILFLPRKRSQAELCADPKELWVQQLMQHLDKTPSPQKPAQGCRKDRGASKTGKKGKGSKGCKRTERSQTPKGPXPSEQPGALETPPASPALEA

SEQ ID NO: 125 - protein, 115 aa, Homo Sapiens
  misc_feature (100)..(100): Xaa can be any naturally occurring amino acid
MKASAALLCLLLTAAAFSPQGLAQPVGINTSTTCCYRFINKKIPKQRLESYRRTTSSHCPREAVIFKTKLDKEICADPTQKWVQDFMKHLDKKTQTPKLXTFMTELKTSHDLRNK

SEQ ID NO: 126 - protein, 110 aa, Homo Sapiens
  misc_feature (100)..(100): Xaa can be any naturally occurring amino acid
MKVSAALLCLLLMAATFSPQGLAQPDSVSIPITCCFNVINRKIPIQRLESYTRITNIQCPKEAVIFKTKRGKEVCADPKERWVRDSMKHLDQIFQNLKPXAFIHGLRVRA

SEQ ID NO: 127 - protein, 500 aa, Homo Sapiens
  misc_feature (466)..(466): Xaa can be any naturally occurring amino acid
METGFPAIMYPGSFIGGWGEEYLSWEGPGLPDFVFQQQPVESEAMHCSNPKSGVVLATVARGPDACQILTRAPLGQDPPQRTVLGLLTANGQYRRTCGQGITRIRCYSGSENAFPPAGKKALPDCGVQEPPKQGFDIYMDELEQGDRDSCSVREGMAFEDVYEVDTGTLKSDLHFLLDFNTVSPMLVDSSLLSQSEDISSLGTDVINVTEYAEEIYQYLREAEIRHRPKAHYMKKQPDITEGMRTILVDWLVEVGEEYKLRAETLYLAVNFLDRFLSCMSVLRGKLQLVGTAAMLLASKYEEIYPPEVDEFVYITDDTYTKRQLLKMEHLLLKVLAFDLTVPTTNQFLLQYLRRQGVCVRTENLAKYVAELSLLEADPFLKYLPSLIAAAAFCLANYTVNKHFWPETLAAFTGYSLSEIVPCLSELHKAYLDIPHRPQQAIREKYKASKYLCVSLMEPPAVLLLQXVSEWKHFQNFTSISEVPIIVIGFCTLDQLMLFTI

SEQ ID NO: 128 - protein, 473 aa, Homo Sapiens
  misc_feature (434)..(434): Xaa can be any naturally occurring amino acid
MALRVTRNSKINAENKAKINMAGAKRVPTAPAATSKPGLRPRTALGDIGNKVSEQLQAKMPMKKEAKPSATGKVIDKKLPKPLEKVPMLVPVPVSEPVPEPEPEPEPEPVKEEKLSPEPILVDTASPSPMETSGCAPAEEDLCQAFSDVILAVNDVDAEDGADPNLCSEYVKDIYAYLRQLEEEQAVRPKYLLGREVTGNMRAILIDWLVQVQMKFRLLQETMYMTVSIIDRFMQNNCVPKKMLQLVGVTAMFIASKYEEMYPPEIGDFAFVTDNTYTKHQIRQMEMKILRALNFGLGRPLPLHFLRRASKIGEVDVEQHTLAKYLMELTMLDYDMVHFPPSQIAAGAFCLALKILDNGEWTPTLQHYLSYTEESLLPVMQHLAKNVVMVNQGLTKHMTVKNKYATSKHAKISTLPQLNSALVQDLAKAVAKVXLVNLSWSTIFTNKIGTMCHLYILLLHLLLIKLVAPFTFL

SEQ ID NO: 129 - protein, 318 aa, Homo Sapiens
  misc_feature (296)..(296): Xaa can be any naturally occurring amino acid
MEHQLLCCEVETIRRAYPDANLLNDRVLRAMLKAEETCAPSVSYFKCVQKEVLPSMRKIVATWMLEVCEEQKCEEEVFPLAMNYLDRFLSLEPVKKSRLQLLGATCMFVASKMKETIPLTAEKLCIYTDNSIRPEELLQMELLLVNKLKWNLAAMTPHDFIEHFLSKMPEAEENKQIIRKHAQTFVALCATDVKFISNPPSMVAAGSVVAAVQGLNLRSPNNFLSYYRLTRFLSRVIKCDPDCLRACQEQIEALLESSLRQAQQNMDPKAAEEEEEEEEEVDLACTPTDVRDVDIXGRQAGGRHRHPQRGRSRPQVLP

SEQ ID NO: 130 - protein, 302 aa, Homo Sapiens
  misc_feature (290)..(290): Xaa can be any naturally occurring amino acid
MELLCHEVDPVRRAVRDRNLLRDDRVLQNLLTIEERYLPQCSYFKCVQKDIQPYMRRMVATWMLEVCEEQKCEEEVFPLAMNYLDRFLAGVPTPKSHLQLLGAVCMFLASKLKETSPLTAEKLCIYTDNSIKPQELLEWELVVLGKLKWNLAAVTPHDFIEHILRKLPQQREKLSLIRKHAQTFIALCATDFKFAMYPPSMIATGSVGAAICGLQQDEEVSSLTCDALTELLAKITNTDVDCLKACQEQIEAVLLNSLQQYRQDQRDGSKSEDELDQASTPTDVRDIDLXGCQLGRKRETRP

SEQ ID NO: 131 - protein, 443 aa, Homo Sapiens
  misc_feature (411)..(411): Xaa can be any naturally occurring amino acid
MPRERRERDAKERDTMKEDGGAEFSARSRKRKANVTVFLQDPDEEMAKIDRTARDQCGSQPWDNNAVCADPCSLIPTPDKEDDDRVYPNSTCKPRIIAPSRGSPLPVLSWANREEVWKIMLNKEKTYLRDQHFLEQHPLLQPKMRAILLDWLMEVCEVYKLHRETFYLAQDFFDRYMATQENVVKTLLQLIGISSLFIAAKLEEIYPPKLHQFAYVTDGACSGDEILTMELMIMKALKWRLSPLTIVSWLNVYMQVAYLNDLHEVLLPQYPQQIFIQIAELLDLCVLDVDCLEFPYGILAASALYHFSSSELMQKVSGYQWCDIENCVKWMVPFAMVIRETGSSKLKHFRGVADEDAHNIQTHRDSLDLLDKARAKKAMLSEQNRASPLPSGLLTPPQSGKKQSSGPEMAXPPHPSPPKTVARLLHVLFCLLQRRRAFAFTDI

SEQ ID NO: 132 - protein, 428 aa, Homo Sapiens
  misc_feature (396)..(396): Xaa can be any naturally occurring amino acid
MKEDGGAEFSARSRKRKANVTVFLQDPDEEMAKIDRTARDQCGSQPWDNNAVCADPCSLIPTPDKEDDDRVYPNSTCKPRIIAPSRGSPLPVLSWANREEVWKIMLNKEKTYLRDQHFLEQHPLLQPKMRAILLDWLMEVCEVYKLHRETFYLAQDFFDRYMATQENVVKTLLQLIGISSLFIAAKLEEIYPPKLHQFAYVTDGACSGDEILTMELMIMKALKWRLSPLTIVSWLNVYMQVAYLNDLHEVLLPQYPQQIFIQIAELLDLCVLDVDCLEFPYGILAASALYHFSSSELMQKVSGYQWCDIENCVKWMVPFAMVIRETGSSKLKHFRGVADEDAHNIQTHRDSLDLLDKARAKKAMLSEQNRASPLPSGLLTPPQSGKKQSSGPEMAXPPHPSPPKTVARLLHVLFCLLQRRRAFAFTDI

SEQ ID NO: 133 - protein, 306 aa, Homo Sapiens
  misc_feature (296)..(296): Xaa can be any naturally occurring amino acid
MIEVLTTTDSQKLLHQLNALLEQESRCQPKVCGLRLIESAHDNGLRMTARLRDFEVKDLLSLTQFFGFDTETFSLAVNLLDRFLSKMKVQPKHLGCVGLSCFYLAVKSIEEERNVPLATDLIRISQYRFTVSDLMRMEKIVLEKVCWKVKATTAFQFLQLYYSLLQENLPLERRNSINFERLEAQLKACHCRIIFSKAKPSVLALSIIALEIQAQKCVELTEGIECLQKHSKINGRDLTFWQELVSKCLTEYSSNKCSKPNVQKLKWIVSGRTARQLKHSYYRITHLPTIPEMVPXLDYYSTKKLL

SEQ ID NO: 134 - protein, 361 aa, Homo Sapiens
  misc_feature (345)..(345): Xaa can be any naturally occurring amino acid
MKDLGAEHLAGHEGVQLLGLLNVYLEQEERFQPREKGLSLIEATPENDNTLCPGLRNAKVEDLRSLANFFGSCTETFVLAVNILDRFLALMKVKPKHLSCIGVCSFLLAARIVEEDCNIPSTHDVIRISQCKCTASDIKRMEKIISEKLHYELEATTALNFLHLYHTIILCHTSERKEILSLDKLEAQLKACNCRLIFSKAKPSVLALCLLNLEVETLKSVELLEILLLVKKHSKINDTEFFYWRELVSKCLAEYSSPECCKPDLKKLVWIVSRRTAQNLHNSYYSVPELPTIPEGGCFDESESEDSCEDMSCGEESLSSSPPSDQECTFFFNFKVAQTLCFPSXKSDCSVRIYIYRVSKQ

SEQ ID NO: 135 - protein, 338 aa, Homo Sapiens
  misc_feature (324)..(324): Xaa can be any naturally occurring amino acid
MYHNSSQKRHWTFSSEEQLARLRADANRKFRCKAVANGKVLPNDPVFLEPHEEMTLCKYYEKRLLEFCSVFKPAMPRSVVGTACMYFKRFYLNNSVMEYHPRIIMLTCAFLACKVDEFNVSSPQFVGNLRESPLGQEKALEQILEYELLLIQQLNFHLIVHNPYRPFEGFLIDLKTRYPILENPEILRKTADDFLNRIALTDAYLLYTPSQIALTAILSSASRAGITMESYLSESLMLKENRTCLSQLLDIMKSMRNLVKKYEPPRSEEVAVLKQKLERCHSAELALNVITKKRKGYEDDDYVSKKSKHEEEEWTDDDLVESLXPFEVDFSMLTNQEK

SEQ ID NO: 136 - protein, 397 aa, Homo Sapiens
  misc_feature (379)..(379): Xaa can be any naturally occurring amino acid
MDLGKPMKSVLVVALLVIFQVCLCQDEVTDDYIGDNTTVDYTLFESLCSKKDVRNFKAWFLPIMYSIICFVGLLGNGLVVLTYIYFKRLKTMTDTYLLNLAVADILFLLTLPFWAYSAAKSWVFGVHFCKLIFAIYKMSFFSGMLLLLCISIDRYVAIVQAVSAHRHRARVLLISKLSCVGIWILATVLSIPELLYSDLQRSSSEQAMRCSLITEHVEAFITIQVAQMVIGFLVPLLAMSFCYLVIIRTLLQARNFERNKAIKVIIAVVVVFIVFQLPYNGVVLAQTVANFNITSSTCELSKQLNIAYDVTYSLACVRCCVNPFLYAFIGVKFRNDLFKLFKDLGCLSQEQLRQWSSCRHIRRSSMSVEAETTTTFSPXATLLPGLEGPLPGSLGWG

SEQ ID NO: 137 - protein, 483 aa, Homo Sapiens
  misc_feature (473)..(473): Xaa can be any naturally occurring amino acid
MGCDRNCGLIAGAVIGAVLAVFGGILMPVGDLLIQKTIKKQVVLEEGTIAFKNWVKTGTEVYRQFWIFDVQNPQEVMMNSSNIQVKQRGPYTYRVRFLAKENVTQDAEDNTVSFLQPNGAIFEPSLSVGTEADNFTVLNLAVAAASHIYQNQFVQMILNSLINKSKSSMFQVRTLRELLWGYRDPFLSLVPYPVTTTVGLFYPYNNTADGVYKVFNGKDNISKVAIIDTYKGKRNLSYWESHCDMINGTDAASFPPFVEKSQVLQFFSSDICRSIYAVFESDVNLKGIPVYRFVLPSKAFASPVENPDNYCFCTEKIISKNCTSYGVLDISKCKEGRPVYISLPHFLYASPDVSEPIDGLNPNEEEHRTYLDIEPITGFTLQFAKRLQVNLLVKPSEKIQVLKNLKRNYIVPILWLNETGTIGDEKANMFRSQVTGKINLLGLIEMILLSVGVVMFVAFMISYCACRSKTIKXVSMYQKILLQ

SEQ ID NO: 138 - protein, 487 aa, Homo Sapiens
  misc_feature (473)..(473): Xaa can be any naturally occurring amino acid
MGCDRNCGLIAGAVIGAVLAVFGGILMPVGDLLIQKTIKKQVVLEEGTIAFKNWVKTGTEVYRQFWIFDVQNPQEVMMNSSNIQVKQRGPYTYRVRFLAKENVTQDAEDNTVSFLQPNGAIFEPSLSVGTEADNFTVLNLAVAAASHIYQNQFVQMILNSLINKSKSSMFQVRTLRELLWGYRDPFLSLVPYPVTTTVGLFYPYNNTADGVYKVFNGKDNISKVAIIDTYKGKRNLSYWESHCDMINGTDAASFPPFVEKSQVLQFFSSDICRSIYAVFESDVNLKGIPVYRFVLPSKAFASPVENPDNYCFCTEKIISKNCTSYGVLDISKCKEGRPVYISLPHFLYASPDVSEPIDGLNPNEEEHRTYLDIEPITGFTLQFAKRLQVNLLVKPSEKIQVLKNLKRNYIVPILWLNETGTIGDEKANMFRSQVTGKINLLGLIEMILLSVGVVMFVAFMISYCACRSKTIKXTWLKHKPICVVLIQ

SEQ ID NO: 139 - protein, 320 aa, Homo Sapiens
  misc_feature (301)..(301): Xaa can be any naturally occurring amino acid
MANCEFSPVSGDKPCCRLSRRAQLCLGVSILVLILVVVLAVVVPRWRQQWSGPGTTKRFPETVLARCVKYTEIHPEMRHVDCQSVWDAFKGAFISKHPCNITEEDYQPLMKLGTQTVPCNKILLWSRIKDLAHQFTQVQRDMFTLEDTLLGYLADDLTWCGEFNTSKINYQSCPDWRKDCSNNPVSVFWKTVSRRFAEAACDVVHVMLNGSRSKIFDKNSTFGSVEVHNLQPEKVQTLEAWVIHGGREDSRDLCQDPTIKELESIISKRNIQFSCKNIYRPDKFLQCVKNPEDSSCTSEIXASRCGCFSSLTPCGLCHHT

SEQ ID NO: 140 - protein, 452 aa, Homo Sapiens
  misc_feature (278)..(278): Xaa can be any naturally occurring amino acid
MVRLPLQCVLWGCLLTAVHPEPPTACREKQYLINSQCCSLCQPGQKLVSDCTEFTETECLPCGESEFLDTWNRETHCHQHKYCDPNLGLRVQQKGTSETDTICTCEEGWHCTSEACESCVLHRSCSPGFGVKQIATGVSDTICEPCPVGFFSNVSSAFEKCHPWTSCETKDLVVQQAGTNKTDVVCGPQDRLRALVVIPIIFGILFAILLVLVFIKKVAKKPTNKAPHPKQEPQEINFPDDLPGSNTAAPVQETLHGCQPVTQEDGKESRISVQERQXGCTHPGVWPRGQTGSWPESLVLLLLWREGEGLALTGHSSPLLPAPLQFETGDLALDAETVHLEEPLTSPWSPSSLPTCIKDRGRSLVVVVLGYGLVISTRPSDPAVWCPERHHGGFPAPRKPYTQMPIAALFVIVNNWKLLNCPSAGDWLNKIRIYLYNRISKTLLSKEKKACC

SEQ ID NO: 141 - protein, 284 aa, Homo Sapiens
  misc_feature (204)..(204): Xaa can be any naturally occurring amino acid
MVRLPLQCVLWGCLLTAVHPEPPTACREKQYLINSQCCSLCQPGQKLVSDCTEFTETECLPCGESEFLDTWNRETHCHQHKYCDPNLGLRVQQKGTSETDTICTCEEGWHCTSEACESCVLHRSCSPGFGVKQIATGVSDTICEPCPVGFFSNVSSAFEKCHPWTRSPGSAESPGGDPHHLRDPVCHPLGAGLYQKGGQEANQXGPPPQAGTPGDQFSRRSSWLQHCCSSAGDFTWMPTGHPGGWQRESHLSAGETVRLHPPRSVATWANRQLAREPGAAAAVA

SEQ ID NO: 142 - protein, 68 aa, Homo Sapiens
  misc_feature (62)..(62): Xaa can be any naturally occurring amino acid
MKRFLFLLLTISLLVMVQIQTGLSGQNDTSQTSSPSASSNISGGIFLFFVANAIIHLFCFSXGDTSQP

SEQ ID NO: 143 - protein, 143 aa, Homo Sapiens
  misc_feature (129)..(129): Xaa can be any naturally occurring amino acid
MGIQGGSVLFGLLLVLAVFCHSGHSLQCYNCPNPTADCKTAVNCSSDFDACLITKAGLQVYNKCWKFEHCNFNDVTTRLRENELTYYCCKKDLCNFNEQLENGGTSLSEKTVLLLVTPFLAAAWSLHPXVNTRRASPKLPVPA

SEQ ID NO: 144 - protein, 202 aa, Homo Sapiens
  misc_feature (194)..(194): Xaa can be any naturally occurring amino acid
MPEEGSGCSVRRRPYGCVLRAALVPLVAGLVICLVVCIQRFAQAQQQLPLESLGWDVAELQLNHTGPQQDPRLYWQGGPALGRSFLHGPELDKGQLRIHRDGIYMVHIQVTLAICSSTTASRHHPTTLAVGICSPASRSISLLRLSFHQGCTIASQRLTPLARGDTLCTNLTGTLLPSRNTDETFFGVQWVRPXPLLLIRVF

SEQ ID NO: 145 - protein, 399 aa, Homo Sapiens
  misc_feature (297)..(297): Xaa can be any naturally occurring amino acid
MHRRRSRSCREDQKPVMDDQRDLISNNEQLPMLGRRPGAPESKCSRGALYTGFSILVTLLLAGQATTAYFLYQQQGRLDKLTVTSQNLQLENLRMKLPKPPKPVSKMRMATPLLMQALPMGALPQGPMQNATKYGNMTEDHVMHLLQNADPLKVYPPLKGSFPENLRHLKNTMETIDWKVFESWMHHWLLFEMSRHSLEQKPTDAPPKVLTKCQEEVSHIPAVHPGSFRPKCDENGNYLPLQCYGSIGYCWCVFPNGTEVPNTRSRGHHNCSESLELEDPSSGLGVTKQDLGPVPMXEQQRRSSTSCQPHTATAFLLPSAPSPSPISHPVPHPMRPWCLALSSPLDKTNQVGTADNNAARPCCPISICQQGREVPGSGQKLDRSPFLTSQQPPTQGSKT

SEQ ID NO: 146 - protein, 335 aa, Homo Sapiens
  misc_feature (233)..(233): Xaa can be any naturally occurring amino acid
MHRRRSRSCREDQKPVMDDQRDLISNNEQLPMLGRRPGAPESKCSRGALYTGFSILVTLLLAGQATTAYFLYQQQGRLDKLTVTSQNLQLENLRMKLPKPPKPVSKMRMATPLLMQALPMGALPQGPMQNATKYGNMTEDHVMHLLQNADPLKVYPPLKGSFPENLRHLKNTMETIDWKVFESWMHHWLLFEMSRHSLEQKPTDAPPKESLELEDPSSGLGVTKQDLGPVPMXEQQRRSSTSCQPHTATAFLLPSAPSPSPISHPVPHPMRPWCLALSSPLDKTNQVGTADNNAARPCCPISICQQGREVPGSGQKLDRSPFLTSQQPPTQGSKT

SEQ ID NO: 147 - protein, 241 aa, Homo Sapiens
  misc_feature (229)..(229): Xaa can be any naturally occurring amino acid
MPVKGGTKCIKYLLFGFNFIFWLAGIAVLAIGLWLRFDSQTKSIFEQETNNNNSSFYTGVYILIGAGALMMLVGFLGCCGAVQESQCMLGLFFGFLLVIFAIEIAAAIWGYSHKDEVIKEVQEFYKDTYNKLKTKDEPQRETLKAIHYALNCCGLAGGVEQFISDICPKKDVLETFTVKSCPDAIKEVFDNKFHIIGAVGIGIAVVMIFGMIFSMILCCAIRRNREMVXSQLTSLSRKVYP

SEQ ID NO: 148 - protein, 644 aa, Homo Sapiens
  misc_feature (621)..(621): Xaa can be any naturally occurring amino acid
MNLERLRKRVRQYLDQQQYQSALFWADKVASLSREEPQDIYWLAQCLYLTAQYHRAAHALRSRKLDKLYEACRYLAARCHYAAKEHQQALDVLDMEEPINKRLFEKYLKDESGFKDPSSDWEMSQSSIKSSICLLRGKIYDALDNRTLATYSYKEALKLDVYCFEAFDLLTSHHMLTAQEEKELLESLPLSKLCNEEQELLRFLFENKLKKYNKPSETVIPESVDGLQENLDVVVSLAERHYYNCDFKMCYKLTSVVMEKDPFHASCLPVHIGTLVELNKANELFYLSHKLVDLYPSNPVSWFAVGCYYLMVGHKNEHARRYLSKATTLEKTYGPAWIAYGHSFAVESEHDQAMAAYFTAAQLMKGCHLPMLYIGLEYGLTNNSKLAERFFSQALSIAPEDPFVMHEVGVVAFQNGEWKTAEKWFLDALEKIKAIGNEVTVDKWEPLLNNLGHVCRKLKKYAEALDYHRQALVLIPQNASTYSAIGYIHSLMGNFENAVDYFHTALGLRRDDTFSVTMLGHCIEMYIGDSEAYIGADIKDKLKCYDFDVHTMKTLKNIISPPWDFREFEVEKQTAEETGLTPLETSRKTPDSRPSLEETFEIEMNESDMMLETSMSDHSTXLQSVVLVPLSQCRLVFLHILSMA

SEQ ID NO: 149 - protein, 639 aa, Homo Sapiens
  misc_feature (621)..(621): Xaa can be any naturally occurring amino acid
MNLERLRKRVRQYLDQQQYQSALFWADKVASLSREEPQDIYWLAQCLYLTAQYHRAAHALRSRKLDKLYEACRYLAARCHYAAKEHQQALDVLDMEEPINKRLFEKYLKDESGFKDPSSDWEMSQSSIKSSICLLRGKIYDALDNRTLATYSYKEALKLDVYCFEAFDLLTSHHMLTAQEEKELLESLPLSKLCNEEQELLRFLFENKLKKYNKPSETVIPESVDGLQENLDVVVSLAERHYYNCDFKMCYKLTSVVMEKDPFHASCLPVHIGTLVELNKANELFYLSHKLVDLYPSNPVSWFAVGCYYLMVGHKNEHARRYLSKATTLEKTYGPAWIAYGHSFAVESEHDQAMAAYFTAAQLMKGCHLPMLYIGLEYGLTNNSKLAERFFSQALSIAPEDPFVMHEVGVVAFQNGEWKTAEKWFLDALEKIKAIGNEVTVDKWEPLLNNLGHVCRKLKKYAEALDYHRQALVLIPQNASTYSAIGYIHSLMGNFENAVDYFHTALGLRRDDTFSVTMLGHCIEMYIGDSEAYIGADIKDKLKCYDFDVHTMKTLKNIISPPWDFREFEVEKQTAEETGLTPLETSRKTPDSRPSLEETFEIEMNESDMMLETSMSDHSTXLQSVVLVPLSQCRNRDPP

SEQ ID NO: 150 - protein, 339 aa, Homo Sapiens
  misc_feature (298)..(298): Xaa can be any naturally occurring amino acid
MEDYTKIEKIGEGTYGVVYKGRHKTTGQVVAMKKIRLESEEEGVPSTAIREISLLKELRHPNIVSLQDVLMQDSRLYLIFEFLSMDLKKYLDSIPPGQYMDSSLVKSYLYQILQGIVFCHSRRVLHRDLKPQNLLIDDKGTIKLADFGLARAFGIPIRVYTHEVVTLWYRSPEVLLGSARYSTPVDIWSIGTIFAELATKKPLFHGDSEIDQLFRIFRALGTPNNEVWPEVESLQDYKNTFPKWKPGSLASHVKNLDENGLDLLSKMLIYDPAKRISGKMALNHPYFNDLDNQIKKMXLSDKKFPYVMSTDSCVFIVNSCLFLSYIYFFVIKLQLYFVF

SEQ ID NO: 151 - protein, 282 aa, Homo Sapiens
  misc_feature (241)..(241): Xaa can be any naturally occurring amino acid
MEDYTKIEKIGEGTYGVVYKGRHKTTGQVVAMKKIRLESEEEGVPSTAIREISLLKELRHPNIVSLQDVLMQDSRLYLIFEFLSMDLKKYLDSIPPGQYMDSSLVKVVTLWYRSPEVLLGSARYSTPVDIWSIGTIFAELATKKPLFHGDSEIDQLFRIFRALGTPNNEVWPEVESLQDYKNTFPKWKPGSLASHVKNLDENGLDLLSKMLIYDPAKRISGKMALNHPYFNDLDNQIKKMXLSDKKFPYVMSTDSCVFIVNSCLFLSYIYFFVIKLQLYFVF

SEQ ID NO: 152 - protein, 512 aa, Homo Sapiens
  misc_feature (500)..(500): Xaa can be any naturally occurring amino acid
MAQFAFESDLHSLLQLDAPIPNAPPARWQRKAKEAAGPAPSPMRAANRSHSAGRTPGRTPGKSSSKVQTTPSKPGGDRYIPHRSAAQMEVASFLLSKENQPENSQTPTKKEHQKAWALNLNGFDVEEAKILRLSGKPQNAPEGYQNRLKVLYSQKATPGSSRKTCRYIPSLPDRILDAPEIRNDYYLNLVDWSSGNVLAVALDNSVYLWSASSGDILQLLQMEQPGEYISSVAWIKEGNYLAVGTSSAEVQLWDVQQQKRLRNMTSHSARVGSLSWNSYILSSGSRSGHIHHHDVRVAEHHVATLSGHSQEVCGLRWAPDGRHLASGGNDNLVNVWPSAPGEGGWVPLQTFTQHQGAVKAVAWCPWQSNVLATGGGTSDRHIRIWNVCSGACLSAVDAHSQVCSILWSPHYKELISGHGFAQNQLVIWKYPTMAKVAELKGHTSRVLSLTMSPDGATVASAAADETLRLWRCFELDPARRREREKASAAKSSLIHQGIRXRPTHHLSCFLFF

SEQ ID NO: 153 - protein, 592 aa, Homo Sapiens
  misc_feature (525)..(525): Xaa can be any naturally occurring amino acid
MELGPEPPHRRRLLFACSPPPASQPVVKALFGASAAGGLSPVTNLTVTMDQLQGLGSDYEQPLEVKNNSNLQRMGSSESTDSGFCLDSPGPLDSKENLENPMRRIHSLPQKLLGCSPALKRSHSDSLDHDIFQLIDPDENKENEAFEFKKPVRPVSRGCLHSHGLQEGKDLFTQRQNSAPARMLSSNERDSSEPGNFIPLFTPQSPVTATLSDEDDGFVDLLDGENLKNEEETPSCMASLWTAPLVMRTTNLDNRCKLFDSPSLCSSSTRSVLKRPERSQEESPPGSTKRRKSMSGASPKESTNPEKAHETLHQSLSLASSPKGTIENILDNDPRDLIGDFSKGYLFHTVAGKHQDLKYISPEIMASVLNGKFANLIKEFVIIDCRYPYEYEGGHIKGAVNLHMEEEVEDFLLKKPIVPTDGKRVIVVFHCEFSSERGPRMCRYVRERDRLGNEYPKLHYPELYVLKGGYKEFFMKCQSYCEPPSYRPMHHEDFKEDLKKFRTKSRTWAGEKSKREMYSRLKKLXGRQDQPAAAQASLHPPLPSLLQRNLSKGDSCVTFGEGAWDFHALNLPPTLPRLEPRASCWLRLFCPC

SEQ ID NO: 154 - protein, 552 aa, Homo Sapiens
  misc_feature (485)..(485): Xaa can be any naturally occurring amino acid
MELGPEPPHRRRLLFACSPPPASQPVVKALFGASAAGGLSPVTNLTVTMDQLQGLGSDYEQPLEVKNNSNLQRMGSSESTDSGFCLDSPGPLDSKENLENPMRRIHSLPQKLLGCSPALKRSHSDSLDHDIFQLIDPDENKENLSSNERDSSEPGNFIPLFTPQSPVTATLSDEDDGFVDLLDGENLKNEEETPSCMASLWTAPLVMRTTNLDNRCKLFDSPSLCSSSTRSVLKRPERSQEESPPGSTKRRKSMSGASPKESTNPEKAHETLHQSLSLASSPKGTIENILDNDPRDLIGDFSKGYLFHTVAGKHQDLKYISPEIMASVLNGKFANLIKEFVIIDCRYPYEYEGGHIKGAVNLHMEEEVEDFLLKKPIVPTDGKRVIVVFHCEFSSERGPRMCRYVRERDRLGNEYPKLHYPELYVLKGGYKEFFMKCQSYCEPPSYRPMHHEDFKEDLKKFRTKSRTWAGEKSKREMYSRLKKLXGRQDQPAAAQASLHPPLPSLLQRNLSKGDSCVTFGEGAWDFHALNLPPTLPRLEPRASCWLRLFCPC

SEQ ID NO: 155 - protein, 640 aa, Homo Sapiens
  misc_feature (567)..(567): Xaa can be any naturally occurring amino acid
MEVPQPEPAPGSALSPAGVCGGAQRPGHLPGLLLGSHGLLGSPVRAAASSPVTTLTQTMHDLAGLGSRSRLTHLSLSRRASESSLSSESSESSDAGLCMDSPSPMDPHMAEQTFEQAIQAASRIIRNEQFAIRRFQSMPVRLLGHSPVLRNITNSQAPDGRRKSEAGSGAASSSGEDKENDGFVFKMPWKPTHPSSTHALAEWASRREAFAQRPSSAPDLMCLSPDRKMEVEELSPLALGRFSLTPAEGDTEEDDGFVDILESDLKDDDAVPPGMESLISAPLVKTLEKEEEKDLVMYSKCQRLFRSPSMPCSVIRPILKRLERPQDRDTPVQNKRRRSVTPPEEQQEAEEPKARVLRSKSLCHDEIENLLDSDHRELIGDYSKAFLLQTVDGKHQDLKYISPETMVALLTGKFSNIVDKFVIVDCRYPYEYEGGHIKTAVNLPLERDAESFLLKSPIAPCSLDKRVILIFHCEFSSERGPRMCRFIRERDRAVNDYPSLYYPEMYILKGGYKEFFPQHPNFCEPQDYRPMNHEAFKDELKTFRLKTRSWAGERSRRELCSRLQDQXGACASPATSLAFRGLKPAALWACRAEGLLEASGAVHGKDGVGVLPVCPSPDSPVSSHHFPYPGAPHPWKSPVC

SEQ ID NO: 156 - protein, 613 aa, Homo Sapiens
  misc_feature (540)..(540): Xaa can be any naturally occurring amino acid
MEVPQPEPAPGSALSPAGVCGGAQRPGHLPGLLLGSHGLLGSPVRAAASSPVTTLTQTMHDLAGLGSETPKSQVGTLLFRSRSRLTHLSLSRRASESSLSSESSESSDAGLCMDSPSPMDPHMAEQTFEQAIQAASRIIRNEQFAIRRFQSMPDGFVFKMPWKPTHPSSTHALAEWASRREAFAQRPSSAPDLMCLSPDRKMEVEELSPLALGRFSLTPAEGDTEEDDGFVDILESDLKDDDAVPPGMESLISAPLVKTLEKEEEKDLVMYSKCQRLFRSPSMPCSVIRPILKRLERPQDRDTPVQNKRRRSVTPPEEQQEAEEPKARVLRSKSLCHDEIENLLDSDHRELIGDYSKAFLLQTVDGKHQDLKYISPETMVALLTGKFSNIVDKFVIVDCRYPYEYEGGHIKTAVNLPLERDAESFLLKSPIAPCSLDKRVILIFHCEFSSERGPRMCRFIRERDRAVNDYPSLYYPEMYILKGGYKEFFPQHPNFCEPQDYRPMNHEAFKDELKTFRLKTRSWAGERSRRELCSRLQDQXGACASPATSLAFRGLKPAALWACRAEGLLEASGAVHGKDGVGVLPVCPSPDSPVSSHHFPYPGAPHPWKSPVC

SEQ ID NO: 157 - protein, 654 aa, Homo Sapiens
  misc_feature (581)..(581): Xaa can be any naturally occurring amino acid
MEVPQPEPAPGSALSPAGVCGGAQRPGHLPGLLLGSHGLLGSPVRAAASSPVTTLTQTMHDLAGLGSETPKSQVGTLLFRSRSRLTHLSLSRRASESSLSSESSESSDAGLCMDSPSPMDPHMAEQTFEQAIQAASRIIRNEQFAIRRFQSMPVRLLGHSPVLRNITNSQAPDGRRKSEAGSGAASSSGEDKENDGFVFKMPWKPTHPSSTHALAEWASRREAFAQRPSSAPDLMCLSPDRKMEVEELSPLALGRFSLTPAEGDTEEDDGFVDILESDLKDDDAVPPGMESLISAPLVKTLEKEEEKDLVMYSKCQRLFRSPSMPCSVIRPILKRLERPQDRDTPVQNKRRRSVTPPEEQQEAEEPKARVLRSKSLCHDEIENLLDSDHRELIGDYSKAFLLQTVDGKHQDLKYISPETMVALLTGKFSNIVDKFVIVDCRYPYEYEGGHIKTAVNLPLERDAESFLLKSPIAPCSLDKRVILIFHCEFSSERGPRMCRFIRERDRAVNDYPSLYYPEMYILKGGYKEFFPQHPNFCEPQDYRPMNHEAFKDELKTFRLKTRSWAGERSRRELCSRLQDQXGACASPATSLAFRGLKPAALWACRAEGLLEASGAVHGKDGVGVLPVCPSPDSPVSSHHFPYPGAPHPWKSPVC

SEQ ID NO: 158 - protein, 326 aa, Homo Sapiens
  misc_feature (237)..(237): Xaa can be any naturally occurring amino acid
MARPLVPSSQKALLLELKGLQEEPVEGFRVTLVDEGDLYNWEVAIFGPPNTYYEGGYFKARLKFPIDYPYSPPAFRFLTKMWHPNIYETGDVCISILHPPVDDPQSGELPSERWNPTQNVRTILLSVISLLNEPNTFSPANVDASVMYRKWKESKGKDREYTDIIRKQVLGTKVDAERDGVKVPTTLAEYCVKTKAPAPDEGSDLFYDDYYEDGEVEEEADSCFGDDEDDSGTEESXHHQNKLAEFTSLGPDPWLLRRQTTSRRFCAGPRLLWLFRFGFFSLPMSVLGFHVLQRRGAAPPPLTSLGARWTGPGWERPAHLSPREGS

SEQ ID NO: 159 - protein, 400 aa, Homo Sapiens
  misc_feature (379)..(379): Xaa can be any naturally occurring amino acid
MVDYSVWDHIEVSDDEDETHPNIDTASLFRWRHQARVERMEQFQKEKEELDRGCRECKRKVAECQRKLKELEVAEGGKAELERLQAEAQQLRKEERSWEQKLEEMRKKEKSMPWNVDTLSKDGFSKSMVNTKPEKTEEDSEEVREQKHKTFVEKYEKQIKHFGMLRRWDDSQKYLSDNVHLVCEETANYLVIWCIDLEVEEKCALMEQVAHQTIVMQFILELAKSLKVDPRACFRQFFTKIKTADRQYMEGFNDELEAFKERVRGRAKLRIEKAMKEYEEEERKKRLGPGGLDPVEVYESLPEELQKCFDVKDVQMLQDAISKMDPTDAKYHMQRCIDSGLWVPNSKASEAKEGEEAGPGDPLLEAVPKTGDEKDVSVXPAPATTATCFQAPMCPFSENR

SEQ ID NO: 160 - protein, 575 aa, Homo Sapiens
  misc_feature (561)..(561): Xaa can be any naturally occurring amino acid
MPQTRSQAQATISFPKRKLSRALNKAKNSSDAKLEPTNVQTVTCSPRVKALPLSPRKRLGDDNLCNTPHLPPCSPPKQGKKENGPPHSHTLKGRRLVFDNQLTIKSPSKRELAKVHQNKILSSVRKSQEITTNSEQRCPLKKESACVRLFKQEGTCYQQAKLVLNTAVPDRLPAREREMDVIRNFLREHICGKKAGSLYLSGAPGTGKTACLSRILQDLKKELKGFKTIMLNCMSLRTAQAVFPAIAQEICQEEVSRPAGKDMMRKLEKHMTAEKGPMIVLVLDEMDQLDSKGQDVLYTLFEWPWLSNSHLVLIGIANTLDLTDRILPRLQAREKCKPQLLNFPPYTRNQIVTILQDRLNQVSRDQVLDNAAVQFCARKVSAVSGDVRKALDVCRRAIEIVESDVKSQTILKPLSECKSPSEPLIPKRVGLIHISQVISEVDGNRMTLSQEGAQDSFPLQQKILVCSLMLLIRQLKIKEVTLGKLYEAYSKVCRKQQVAAVDQSECLSLSGLLEARGILGLKRNKETRLTKVFFKIEEKEIEHALKDKALIGNILATGLPXILLLHPTRKYSAGI

SEQ ID NO: 161 - protein, 349 aa, Homo Sapiens
  misc_feature (304)..(304): Xaa can be any naturally occurring amino acid
MATSRYEPVAEIGVGAYGTVYKARDPHSGHFVALKSVRVPNGGGGGGGLPISTVREVALLRRLEAFEHPNVVRLMDVCATSRTDREIKVTLVFEHVDQDLRTYLDKAPPPGLPAETIKDLMRQFLRGLDFLHANCIVHRDLKPENILVTSGGTVKLADFGLARIYSYQMALTPVVVTLWYRAPEVLLQSTYATPVDMWSVGCIFAEMFRRKPLFCGNSEADQLGKIFDLIGLPPEDDWPRDVSLPRGAFPPRGPRPVQSVVPEMEESGAQLLLEMLTFNPHKRISAFRALQHSYLHKDEGNPEXAMEWLPWKEEKLPFPFWTLRGQSLPLSLRLWRVLLHLSTEITLLP

SEQ ID NO: 162 - protein, 379 aa, Homo Sapiens
  misc_feature (327)..(327): Xaa can be any naturally occurring amino acid
MEKDGLCRADQQYECVAEIGEGAYGKVFKARDLKNGGRFVALKRVRVQTGEEGMPLSTIREVAVLRHLETFEHPNVVRLFDVCTVSRTDRETKLTLVFEHVDQDLTTYLDKVPEPGVPTETIKDMMFQLLRGLDFLHSHRVVHRDLKPQNILVTSSGQIKLADFGLARIYSFQMALTSVVVTLWYRAPEVLLQSSYATPVDLWSVGCIFAEMFRRKPLFRGSSDVDQLGKILDVIGLPGEEDWPRDVALPRQAFHSKSAQPIEKFVTDIDELGKDLLLKCLTFNPAKRISAYSALSHPYFQDLERCKENLDSHLPPSQNTSELNTAXGLSSRLKLILRRTPLVAYGSPSASPTELWRIAIWRPSSCCLLDRLCFSKETA

SEQ ID NO: 163 - protein, 356 aa, Homo Sapiens
  misc_feature (347)..(347): Xaa can be any naturally occurring amino acid
MALDVKSRAKRYEKLDFLGEGQFATVYKARDKNTNQIVAIKKIKLGHRSEAKDGINRTALREIKLLQELSHPNIIGLLDAFGHKSNISLVFDFMETDLEVIIKDNSLVLTPSHIKAYMLMTLQGLEYLHQHWILHRDLKPNNLLLDENGVLKLADFGLAKSFGSPNRAYTHQVVTRWYRAPELLFGARMYGVGVDMWAVGCILAELLLRVPFLPGDSDLDQLTRIFETLGTPTEEQWPDMCSLPDYVTFKSFPGIPLHHIFSAAGDDLLDLIQGLFLFNPCARITATQALKMKYFSNRPGPTPGCQLPRPNCPVETLKEQSNPALAIKRKRTEALEQGGLPKKLIFXREHWTTFYY

SEQ ID NO: 164 - protein, 365 aa, Homo Sapiens
  misc_feature (317)..(317): Xaa can be any naturally occurring amino acid
MSDASLRSTSTMERLVARGTFPVLVRTSACRSLFGPVDHEELSRELQARLAELNAEDQNRWDYDFQQDMPLRGPGRLQWTEVDSDSVPAFYRETVQVGRCRLLLAPRPVAVAVAVSPPLEPAAESLDGLEEAPEQLPSVPVPAPASTPPPVPVLAPAPAPAPAPVAAPVAAPVAVAVLAPAPAPAPAPAPAPAPVAAPAPAPAPAPAPAPAPAPAPDAAPQESAEQGANQGQRGQEPLADQLHSGISGRPAAGTAAASANGAAIKKLSGPLISDFFAKRKRSAPEKSSGDVPAPCPSPSAAPGVGSVEQTPRKRLRXANLEPKEPRGNLPGQRTLEGRWASAGTVHVAATGGGCRRAAFGFVFKF

SEQ ID NO: 165 - protein, 169 aa, Homo Sapiens
  misc_feature (157)..(157): Xaa can be any naturally occurring amino acid
MEPAAGSSMEPSADWLATAAARGRVEEVRALLEAGALPNAPNSYGRRPIQVMMMGSARVAELLLLHGAEPNCADPATLTRPVHDAAREGFLDTLVVLHRAGARLDVRDAWGRLPVDLAEELGHRDVARYLRAAAGGTRGSNHARIDAAEGPSDIPDXKNQRGSEKPRET

SEQ ID NO: 166 - protein, 334 aa, Homo Sapiens
  misc_feature (331)..(331): Xaa can be any naturally occurring amino acid
MWLLVSVILISRISSVGGEATFCDFPKINHGILYDEEKYKPFSQVPTGEVFYYSCEYNFVSPSKSFWTRITCTEEGWSPTPKCLRLCFFPFVENGHSESSGQTHLEGDTVQIICNTGYRLQNNENNISCVERGWSTPPKCRSTDTSCVNPPTVQNAHILSRQMSKYPSGERVRYECRSPYEMFGDEEVMCLNGNWTEPPQCKDSTGKCGPPPPIDNGDITSFPLSVYAPASSVEYQCQNLYQLEGNKRITCRNGQWSEPPKCLHPCVISREIMENYNIALRWTAKQKLYLRTGESAEFVCKRGYRLSSRSHTLRTTCWDGKLEYPTCAKRXNQS

SEQ ID NO: 167 - protein, 558 aa, Homo Sapiens
  misc_feature (481)..(481): Xaa can be any naturally occurring amino acid
MSAEVIHQVEEALDTDEKEMLLFLCRDVAIDVVPPNVRDLLDILRERGKLSVGDLAELLYRVRRFDLLKRILKMDRKAVETHLLRNPHLVSDYRVLMAEIGEDLDKSDVSSLIFLMKDYMGRGKISKEKSFLDLVVELEKLNLVAPDQLDLLEKCLKNIHRIDLKTKIQKYKQSVQGAGTSYRNVLQAAIQKSLKDPSNNFRLHNGRSKEQRLKEQLGAQQEPVKKSIQESEAFLPQSIPEERYKMKSKPLGICLIIDCIGNETELLRDTFTSLGYEVQKFLHLSMHGISQILGQFACMPEHRDYDSFVCVLVSRGGSQSVYGVDQTHSGLPLHHIRRMFMGDSCPYLAGKPKMFFIQNYVVSEGQLENSSLLEVDGPAMKNVEFKAQKRGLCTVHREADFFWSLCTADMSLLEQSHSSPSLYLQCLSQKLRQERKRPLLDLHIELNGYMYDWNSRVSAKEKYYVWLQHTLRKKLILSYTXETKRLGVVAHTCNPSTLGGQGGQITSGQEFETSLANMVNAVPSKNAKISWVWVWVPVFPVTWEAEVGGSFEPRSSGS

SEQ ID NO: 168 - protein, 3013 aa, Homo Sapiens
  misc_feature (2998)..(2998): Xaa can be any naturally occurring amino acid
MADPGMMSLFGEDGNIFSEGLEGLGECGYPENPVNPMGQQMPIDQGFASLQPSLHHPSTNQNQTKLTHFDHYNQYEQQKMHLMDQPNRMMSNTPGNGLASPHSQYHTPPVPQVPHGGSGGGQMGVYPGMQNERHGQSFVDSSSMWGPRAVQVPDQIRAPYQQQQPQPQPPQPAPSGPPAQGHPQHMQQMGSYMARGDFSMQQHGQPQQRMSQFSQGQEGLNQGNPFIATSGPGHLSHVPQQSPSMAPSLRHSVQQFHHHPSTALHGESVAHSPRFSPNPPQQGAVRPQTLNFSSRSQTVPSPTINNSGQYSRYPYSNLNQGLVNNTGMNQNLGLTNNTPMNQSVPRYPNAVGFPSNSGQGLMHQQPIHPSGSLNQMNTQTMHPSQPQGTYASPPPMSPMKAMSNPAGTPPPQVRPGSAGIPMEVGSYPNMPHPQPSHQPPGAMGIGQRNMGPRNMQQSRPFIGMSSAPRELTGHMRPNGCPGVGLGDPQAIQERLIPGQQHPGQQPSFQQLPTCPPLQPHPGLHHQSSPPHPHHQPWAQLHPSPQNTPQKVPVHQHSPSEPFLEKPVPDMTQVSGPNAQLVKSDDYLPSIEQQPQQKKKKKKNNHIVAEDPSKGFGKDDFPGGVDNQELNRNSLDGSQEEKKKKKRSKAKKDPKEPKEPKEKKEPKEPKTPKAPKIPKEPKEKKAKTATPKPKSSKKSSNKKPDSEASALKKKVNKGKTEGSENSDLDKTPPPSPPPEEDEDPGVQKRRSSRQVKRKRYTEDLEFKISDEEADDADAAGRDSPSNTSQSEQQESVDAEGPVVEKIMSSRSVKKQKESGEEVEIEEFYVKYKNFSYLHCQWASIEDLEKDKRIQQKIKRFKAKQGQNKFLSEIEDELFNPDYVEVDRIMDFARSTDDRGEPVTHYLVKWCSLPYEDSTWERRQDIDQAKIEEFEKLMSREPETERVERPPADDWKKSESSREYKNNNKLREYQLEGVNWLLFNWYNMRNCILADEMGLGKTIQSITFLYEIYLKGIHGPFLVIAPLSTIPNWEREFRTWTELNVVVYHGSQASRRTIQLYEMYFKDPQGRVIKGSYKFHAIITTFEMILTDCPELRNIPWRCVVIDEAHRLKNRNCKLLEGLKMMDLEHKVLLTGTPLQNTVEELFSLLHFLEPSRFPSETTFMQEFGDLKTEEQVQKLQAILKPMMLRRLKEDVEKNLAPKEETIIEVELTNIQKKYYRAILEKNFTFLSKGGGQANVPNLLNTMMELRKCCNHPYLINGAEEKILEEFKETHNAESPDFQLQAMIQAAGKLVLIDKLLPKLKAGGHRVLIFSQMVRCLDILEDYLIQRRYPYERIDGRVRGNLRQAAIDRFSKPDSDRFVFLLCTRAGGLGINLTAADTCIIFDSDWNPQNDLQAQARCHRIGQSKSVKIYRLITRNSYEREMFDKASLKLGLDKAVLQSMSGRENATNGVQQLSKKEIEDLLRKGAYGALMDEEDEGSKFCEEDIDQILLRRTHTITIESEGKGSTFAKASFVASGNRTDISLDDPNFWQKWAKKAELDIDALNGRNNLVIDTPRVRKQTRLYSAVKEDELMEFSDLESDSEEKPCAKPRRPQDKSQGYARSECFRVEKNLLVYGWGRWTDILSHGRYKRQLTEQDVETICRTILVYCLNHYKGDENIKSFIWDLITPTADGQTRALVNHSGLSAPVPRGRKGKKVKAQSTQPVVQDADWLASCNPDALFQEDSYKKHLKHHCNKVLLRVRMLYYLRQEVIGDQADKILEGADSSEADVWIPEPFHAEVPADWWDKEADKSLLIGVFKHGYEKYNSMRADPALCFLERVGMPDAKAIAAEQRGTDMLADGGDGGEFDREDEDPEYKPTRTPFKDEIDEFANSPSEDKEESMEIHATGKHSESNAELGQLYWPNTSTLTTRLRRLITAYQRSYKRQQMRQEALMKTDRRRRRPREEVRALEAEREAIISEKRQKWTRREEADFYRVVSTFGVIFDPVKQQFDWNQFRAFARLDKKSDESLEKYFSCFVAMCRRVCRMPVKPDDEPPDLSSIIEPITEERASRTLYRIELLRKIREQVLHHPQLGERLKLCQPSLDLPEWWECGRHDRDLLVGAAKHGVSRTDYHILNDPELSFLDAHKNFAQNRGAGNTSSLNPLAVGFVQTPPVISSAHIQDERVLEQAEGKVEEPENPAAKEKCEGKEEEEETDGSGKESKQECEAEASSVKNELKGVEVGADTGSKSISEKGSEEDEEEKLEDDDKSEESSQPEAGAVSRGKNFDEESNASMSTARDETRDGFYMEDGDPSVAQLLHERTFAFSFWPKDRVMINRLDNICEAVLKGKWPVNRRQMFDFQGLIPGYTPTTVDSPLQKRSFAELSMVGQASISGSEDITTSPQLSKEDALNLSVPRQRRRRRRKIEIEAERAAKRRNLMEMVAQLRESQVVSENGQEKVVDLSKASREATSSTSNFSSLSSKFILPNVSTPVSDAFKTQMELLQAGLSRTPTRHLLNGSLVDGEPPMKRRRGRRKNVEGLDLLFMSHKRTSLSAEDAEVTKAFEEDIETPPTRNIPSPGQLDPDTRIPVINLEDGTRLVGEDAPKNKDLVEWLKLHPTYTVDMPSYVPKNADVLFSSFQKPKQKRHRCRNPNKLDINTLTGEERVPVVNKRNGKKMGGAMAPPMKDLPRWLEENPEFAVAPDWTDIVKQSGFVPESMFDRLLTGPVVRGEGASRRGRRPKSEIARAAAAAAAVASTSGINPLLVNSLFAGMDLTSLQNLQNLQSLQLAGLMGFPPGLATAATAGGDAKNPAAVLPLMLPGMAGLPNVFGLGGLLNNPLSAATGNTTTASSQGEPEDSTSKGEEKGNENEDENKDSEKSTDAVSAADSANGSVGAATAPAGLPSNPLAFNPFLLSTMAPGLFYPSMFLPPGLGGLTLPGFPALAGLQNAVGSSEEKAADKAEGGPFKDGETLEGSDAEESLDKTAESSLLEDEIAQGEELDSLDGGDEIENNENDEXPVPVPVQVFKTFDKW

SEQ ID NO: 169 - protein, 493 aa, Homo Sapiens
  misc_feature (477)..(477): Xaa can be any naturally occurring amino acid
MAVPFVEDWDLVQTLGEGAYGEVQLAVNRVTEEAVAVKIVDMKRAVDCPENIKKEICINKMLNHENVVKFYGHRREGNIQYLFLEYCSGGELFDRIEPDIGMPEPDAQRFFHQLMAGVVYLHGIGITHRDIKPENLLLDERDNLKISDFGLATVFRYNNRERLLNKMCGTLPYVAPELLKRREFHAEPVDVWSCGIVLTAMLAGELPWDQPSDSCQEYSDWKEKKTYLNPWKKIDSAPLALLHKILVENPSARITIPDIKKDRWYNKPLKKGAKRPRVTSGGVSESPSGFSKHIQSNLDFSPVNSASSEENVKYSSSQPEPRTGLSLWDTSPSYIDKLVQGISFSQPTCPDHMLLNSQLLGTPGSSQNPWQRLVKRMTRFFTKLDADKSYQCLKETCEKLGYQWKKSCMNQVTISTTDRRNNKLIFKVNLLEMDDKILVDFRLSKGDGLEFKRHFLKIKGKLIDIVSSQKVWLPATXSDHRLWGILVNIVLLC

SEQ ID NO: 170 - protein, 634 aa, Homo Sapiens
  misc_feature (587)..(587): Xaa can be any naturally occurring amino acid
MSRESDVEAQQSHGSSACSQPHGSVTQSQGSSSQSQGISSSSTSTMPNSSQSSHSSSGTLSSLETVSTQELYSIPEDQEPEDQEPEEPTPAPWARLWALQDGFANLETESGHVTQSDLELLLSSDPPASASQSAGIRGVRHHPRPVCSLKCVNDNYWFGRDKSCEYCFDEPLLKRTDKYRTYSKKHFRIFREVGPKNSYIAYIEDHSGNGTFVNTELVGKGKRRPLNNNSEIALSLSRNKVFVFFDLTVDDQSVYPKALRDEYIMSKTLGSGACGEVKLAFERKTCKKVAIKIISKRKFAIGSAREADPALNVETEIEILKKLNHPCIIKIKNFFDAEDYYIVLELMEGGELFDKVVGNKRLKEATCKLYFYQMLLAVQYLHENGIIHRDLKPENVLLSSQEEDCLIKITDFGHSKILGETSLMRTLCGTPTYLAPEVLVSVGTAGYNRAVDCWSLGVILFICLSGYPPFSEHRTQVSLKDQITSGKYNFIPEVWAEVSEKALDLVKKLLVVDPKARFTTEEALRHPWLQDEDMKRKFQDLLSEENESTALPQVLAQPSTSRKRPREGEAEGAETTKRPAVCAAVLXTPWFEHERNVPSFTLSSFFSLSLFFYSLYFNYGNNCFFTVTDVQLKT

SEQ ID NO: 171 - protein, 591 aa, Homo Sapiens
  misc_feature (544)..(544): Xaa can be any naturally occurring amino acid
MSRESDVEAQQSHGSSACSQPHGSVTQSQGSSSQSQGISSSSTSTMPNSSQSSHSSSGTLSSLETVSTQELYSIPEDQEPEDQEPEEPTPAPWARLWALQDGFANLECVNDNYWFGRDKSCEYCFDEPLLKRTDKYRTYSKKHFRIFREVGPKNSYIAYIEDHSGNGTFVNTELVGKGKRRPLNNNSEIALSLSRNKVFVFFDLTVDDQSVYPKALRDEYIMSKTLGSGACGEVKLAFERKTCKKVAIKIISKRKFAIGSAREADPALNVETEIEILKKLNHPCIIKIKNFFDAEDYYIVLELMEGGELFDKVVGNKRLKEATCKLYFYQMLLAVQYLHENGIIHRDLKPENVLLSSQEEDCLIKITDFGHSKILGETSLMRTLCGTPTYLAPEVLVSVGTAGYNRAVDCWSLGVILFICLSGYPPFSEHRTQVSLKDQITSGKYNFIPEVWAEVSEKALDLVKKLLVVDPKARFTTEEALRHPWLQDEDMKRKFQDLLSEENESTALPQVLAQPSTSRKRPREGEAEGAETTKRPAVCAAVLXTPWFEHERNVPSFTLSSFFSLSLFFYSLYFNYGNNCFFTVTDVQLKT

SEQ ID NO: 172 - protein, 562 aa, Homo Sapiens
  misc_feature (515)..(515): Xaa can be any naturally occurring amino acid
MSRESDVEAQQSHGSSACSQPHGSVTQSQGSSSQSQGISSSSTSTMPNSSQSSHSSSGTLSSLETVSTQELYSIPEDQEPEDQEPEEPTPAPWARLWALQDGFANLECVNDNYWFGRDKSCEYCFDEPLLKRTDKYRTYSKKHFRIFREVGPKNSYIAYIEDHSGNGTFVNTELVGKGKRRPLNNNSEIALSLSRNKVFVFFDLTVDDQSVYPKALRDEYIMSKTLGSGACGEVKLAFERKTCKKVAIKIISKRKFAIGSAREADPALNVETEIEILKKLNHPCIIKIKNFFDAEDYYIVLELMEGGELFDKVVGNKRLKEATCKLYFYQMLLAVQITDFGHSKILGETSLMRTLCGTPTYLAPEVLVSVGTAGYNRAVDCWSLGVILFICLSGYPPFSEHRTQVSLKDQITSGKYNFIPEVWAEVSEKALDLVKKLLVVDPKARFTTEEALRHPWLQDEDMKRKFQDLLSEENESTALPQVLAQPSTSRKRPREGEAEGAETTKRPAVCAAVLXTPWFEHERNVPSFTLSSFFSLSLFFYSLYFNYGNNCFFTVTDVQLKT

SEQ ID NO: 173 - protein, 642 aa, Homo Sapiens
  misc_feature (624)..(624): Xaa can be any naturally occurring amino acid
MERPEEGKQSPPPQPWGRLLRLGAEEGEPHVLLRKREWTIGRRRGCDLSFPSNKLVSGDHCRIVVDEKSGQVTLEDTSTSGTVINKLKVVKKQTCPLQTGDVIYLVYRKNEPEHNVAYLYESLSEKQGMTQESFEMVPCCVAQAGLKLLGSSDPPTLASQSIVITGSGGGGISPKGSGPSVASDEVSSFASALPDRKTASFSSLEPQDQEDLEPEKKKMRGDGDLDLNGQLLVAQPRRNAQTVHEDVRAAAGKPDKMEETLTCIICQDLLHDCVSLQPCMHTFCAACYSGWMERSSLCPTCRCPVERICKNHILNNLVEAYLIQHPDKSRSEEDVQSMDARNKITQDMLQPKVRRSFSDEEGSSEDLLELSDVDSESSDISQPYVVCRQCPEYRRQAAQPPHCPAPEGEPGAPQALGDAPPTSVSLTTAVQDYVCPLQGSHALCTCCFQPMPDRRAEREQDPRVAPQQCAVCLQPFCHLYWGCTRTGCYGCLAPFCELNLGDKCLDGVLNNNSYESDILKNYLATRGLTWKNMLTESLVALQRGVFLLSDYRVTGDTVLCYCCGLRSFRELTYQYQQNIPASELPVAVTSRPDCYWGRNCRTQVKAHHAMKFNHICEQTRFKNXASRGPEQLSALEVKRACF

SEQ ID NO: 174 - protein, 227 aa, Homo Sapiens
  misc_feature (197)..(197): Xaa can be any naturally occurring amino acid
MGSRSSHAAVIPDGDSIRRETGFSQASLLRLHHRFRALDRNKKGYLSRMDLQQIGALAVNPLGDRIIESFFPDGSQRVDFPGFVRVLAHFRPVEDEDTETQDPKKPEPLNSRRNKLHYAFQLYDLDRDGKISRHEMLQVLRLMVGVQVTEEQLENIADRTVQEADEDGDGAVSFVEFTKSLEKMDVEQKMSIRILKXLRLCLGLAPATSISLEFIQSPHGRMDAGRQ

SEQ ID NO: 175 - protein, 245 aa, Homo Sapiens
  misc_feature (188)..(188): Xaa can be any naturally occurring amino acid
MGNKQTIFTEEQLDNYQDCTFFNKKDILKLHSRFYELAPNLVPMDYRKSPIVHVPMSLIIQMPELRENPFKERIVAAFSEDGEGNLTFNDFVDMFSVLCESAPRELKANYAFKIYDFNTDNFICKEDLELTLARLTKSELDEEEVVLVCDKVIEEADLDGDGKLGFADFEDMIAKAPDFLSTFHIRIXGHCRGCRGLEVHHPALQSHGCGLQAPQESSGSLWGLHHKYILWPFQQKKNLNQEGGL

SEQ ID NO: 176 - protein, 101 aa, Homo Sapiens
  misc_feature (80)..(80): Xaa can be any naturally occurring amino acid
MSHKQIYYSDKYDDEEFEYRHVMLPKDIAKLVPKTHLMSESEWRNLGVQQSQGWVHYMIHEPEPHILLFRRPLPKKPKKXSWQATFQPQALHSCPYFLTSF

SEQ ID NO: 177 - protein, 99 aa, Homo Sapiens
  misc_feature (80)..(80): Xaa can be any naturally occurring amino acid
MAHKQIYYSDKYFDEHYEYRHVMLPRELSKQVPKTHLMSEEEWRRLGVQQSLGWVHYMIHEPEPHILLFRRPLPKDQQKXSLSGDRQIFFKFNVYVYIR

SEQ ID NO: 178 - protein, 340 aa, Homo Sapiens
  misc_feature (221)..(221): Xaa can be any naturally occurring amino acid
MSMGLEITGTALAVLGWLGTIVCCALPMWRVSAFIGSNIITSQNIWEGLWMNCVVQSTGQMQCKVYDSLLALPQDLQAARALIVVAILLAAFGLLVALVGAQCTNCVQDDTAKAKITIVAGVLFLLAALLTLVPVSWSANTIIRDFYNPVVPEAQKREMGAGLYVGWAAAALQLLGGALLCCSCPPREKKYTATKVVYSAPRSTGPGASLGTGYDRKDYVXGTDAGRPHHHHHHQHHHHHRELERAPGHPACSLASEASPPPEARKPPRWTGAASPAATALRAGQSTSGPRDQPAWTVKPHPSGARGLGDRQYLTTPSSPIGPLPPCSRWAGTGSPGRGT

SEQ ID NO: 179 - protein, 226 aa, Homo Sapiens
  misc_feature (210)..(210): Xaa can be any naturally occurring amino acid
MASMGLQVMGIALAVLGWLAVMLCCALPMWRVTAFIGSNIVTSQTIWEGLWMNCVVQSTGQMQCKVYDSLLALPQDLQAARALVIISIIVAALGVLLSVVGGKCTNCLEDESAKAKTMIVAGVVFLLAGLMVIVPVSWTAHNIIQDFYNPLVASGQKREMGASLYVGWAASGLLLLGGGLLCCNCPPRTDKPYSAKYSAARSAAASNYVXGATAPLCSSLLCSSLD

SEQ ID NO: 180 - protein, 292 aa, Homo Sapiens
  misc_feature (242)..(242): Xaa can be any naturally occurring amino acid
MAEEQPQVELFVKAGSDGAKIGNCPFSQRLFMVLWLKGVTFNVTTVDTKRRTETVQKLCPGGQLPFLLYGTEVHTDTNKIEEFLEAVLCPPRYPKLAALNPESNTAGLDIFAKFSAYIKNSNPALNDNLEKGLLKALKVLDNYLTSPLPEEVDETSAEDEGVSQRKFLDGNELTLADCNLLPKLHIVQVVCKKYRGFTIPEAFRGVHRYLSNAYAREEFASTCPDDEEIELAYEQVAKALKXAPPGTPSTPSIFSTKALVVSTLLPNGHTPKWPVGRESWSTCSGMVWWKRG

SEQ ID NO: 181 - protein, 1034 aa, Homo Sapiens
  misc_feature (982)..(982): Xaa can be any naturally occurring amino acid
MLRRPAPALAPAARLLLAGLLCGGGVWAARVNKHKPWLEPTYHGIVTENDNTVLLDPPLIALDKDAPLRFAESFEVTVTKEGEICGFKIHGQNVPFDAVVVDKSTGEGVIRSKEKLDCELQKDYSFTIQAYDCGKGPDGTNVKKSHKATVHIQVNDVNEYAPVFKEKSYKATVIEGKQYDSILRVEAVDADCSPQFSQICSYEIITPDVPFTVDKDGYIKNTEKLNYGKEHQYKLTVTAYDCGKKRATEDVLVKISIKPTCTPGWQGWNNRIEYEPGTGALAVFPNIHLETCDEPVASVQATVELETSHIGKGCDRDTYSEKSLHRLCGAAAGTAELLPSPSGSLNWTMGLPTDNGHDSDQVFEFNGTQAVRIPDGVVSVSPKEPFTISVWMRHGPFGRKKETILCSSDKTDMNRHHYSLYVHGCRLIFLFRQDPSEEKKYRPAEFHWKLNQVCDEEWHHYVLNVEFPSVTLYVDGTSHEPFSVTEDYPLHPSKIETQLVVGACWQEFSGVENDNETEPVTVASAGGDLHMTQFFRGNLAGLTLRSGKLADKKVIDCLYTCKEGLDLQVLEDSGRGVQIQAHPSQLVLTLEGEDLGELDKAMQHISYLNSRQFPTPGIRRLKITSTIKCFNEATCISVPPVDGYVMVLQPEEPKISLSGVHHFARAASEFESSEGVFLFPELRIISTITREVEPEGDGAEDPTVQESLVSEEIVHDLDTCEVTVEGEELNHEQESLEVDMARLQQKGIEVSSSELGMTFTGVDTMASYEEVLHLLRYRNWHARSLLDRKFKLICSELNGRYISNEFKVEVNVIHTANPMEHANHMAAQPQFVHPEHRSFVDLSGHNLANPHPFAVVPSTATVVIVVCVSFLVFMIILGVFRIRAAHRRTMRDQDTGKENEMDWDDSALTITVNPMETYEDQHSSEEEEEEEEEEESEDGEEEDDITSAESESSEEEEGEQGDPQNATRQQQLEWDDSTLSYXPVPPATSVSAFEDSAAIRSPSPKGPRCTKSFRPVGVQTPPRHDRRCAWCVGP

SEQ ID NO: 182 - protein, 335 aa, Homo Sapiens
  misc_feature (298)..(298): Xaa can be any naturally occurring amino acid
MSSAHFNRGPAYGLSAEVKNKLAQKYDHQREQELREWIEGVTGRRIGNNFMDGLKDGIILCEFINKLQPGSVKKINESTQNWHQLENIGNFIKAITKYGVKPHDIFEANDLFENTNHTQVQSTLLALASMAKTKGNKVNVGVKYAEKQERKFEPGKLREGRNIIGLQMGTNKFASQQGMTAYGTRRHLYDPKLGTDQPLDQATISLQMGTNKGASQAGMTAPGTKRQIFEPGLGMEHCDTLNVSLQMGSNKGASQRGMTVYGLPRQVYDPKYCLTPEYPELGEPAHNHHAHNYYNSAXGHKAFPVFPPREAAAALGWTQPGPADPLSLHGILQPL

SEQ ID NO: 183 - protein, 1523 aa, Homo Sapiens
  misc_feature (1498)..(1498): Xaa can be any naturally occurring amino acid
MDVTKKNKRDGTEVTERIVTETVTTRLTSLPPKGGTSNGYAKTASLGGGSRLEKQSLTHGSSGYINSTGSTRGHASTSSYRRAHSPASTLPNSPGSTFERKTHVTRHAYEGSSSGNSSPEYPRKEFASSSTRGRSQTRESEIRVRLQSASPSTRWTELDDVKRLLKGSRSASVSPTRNSSNTLPIPKKGTVETKIVTASSQSVSGTYDATILDANLPSHVWSSTLPAGSSMGTYHNNMTTQSSSLLNTNAYSAGSVFGVPNNMASCSPTLHPGLSTSSSVFGMQNNLAPSLTTLSHGTTTTSTAYGVKKNMPQSPAAVNTGVSTSAACTTSVQSDDLLHKDCKFLILEKDNTPAKKEMELLIMTKDSGKVFTASPASIAATSFSEDTLKKEKQAAYNADSGLKAEANGDLKTVSTKGKTTTADIHSYGSSGGGGSGGGGGVGGAGGGPWGPAPAWCPCGSCCSWWKWLLGLLLTWLLLLGLLFGLIALAEEVRKLKARVDELERIRRSILPYGDSMDRIEKDRLQGMAPAAGADLDKIGLHSDSQEELWMFVRKKLMMEQENGNLRGSPGPKGDMGSPGPKGDRGFPGTPGIPGPLGHPGPQGPKGQKGSVGDPGMEGPMGQRGREGPMGPRGEAGPPGSGEKGERGAAGEPGPHGPPGVPGSVGPKGSSGSPGPQGPPGPVGLQGLRGEVGLPGVKGDKGPMGPPGPKGDQGEKGPRGLTGEPGMRGLPGAVGEPGAKGAMGPAGPDGHQGPRGEQGLTGMPGIRGPPGPSGDPGKPGLTGPQGPQGLPGTPGRPGIKGEPGAPGKIVTSEGSSMLTVPGPPGPPGAMGPPGPPGAPGPAGPAGLPGHQEVLNLQGPPGPPGPRGPPGPSIPGPPGPRGPPGEGLPGPPGPPGSFLSNSETFLSGPPGPPGPPGPKGDQGPPGPRGHQGEQGLPGFSTSGSSSFGLNLQGPPGPPGPQGPKGDKGDPGVPGALGIPSGPSEGGSSSTMYVSGPPGPPGPPGPPGSISSSGQEIQQYISEYMQSDSIRSYLSGVQGPPGPPGPPGPVTTITGETFDYSELASHVVSYLRTSGYGVSLFSSSISSEDILAVLQRDDVRQYLRQYLMGPRGPPGPPGASGDGSLLSLDYAELSSRILSYMSSSGISIGLPGPPGPPGLPGTSYEELLSLLRGSEFRGIVGPPGPPGPPGIPGNVWSSISVEDLSSYLHTAGLSFIPGPPGPPGPPGPRGPPGVSGALATYAAENSDSFRSELISYLTSPDVRSFIVGPPGPPGPQGPPGDSRLLSTDASHSRGSSSSSHSSSVRRGSSYSSSMSTGGGGAGSLGAGGAFGEAAGDRGPYGTDIGPGGGYGAAAEGGMYAGNGGLLGADFAGDLDYNELAVRVSESMQRQGLLQGMAYTVQGPPGQPGPQGPPGISKVFSAYSNVTADLMDFFQTYGAIQGPPGQKGEMGTPGPKGDRGPAGPPGHPGPPGPRGHKGEKGDKGDQVYAGRRRRRSIAVKPXASHGRTAPGPGLIMHVALRSKVSRG

SEQ ID NO: 184 - protein, 1416 aa, Homo Sapiens
  misc_feature (1337)..(1337): Xaa can be any naturally occurring amino acid
MAPRCPWPWPRRRRLLDVLAPLVLLLGVRAASAEPERISEEVGLLQLLGDPPPQQVTQTDDPDVGLAYVFGPDANSGQVARYHFPSLFFRDFSLLFHIRPATEGPGVLFAITDSAQAMVLLGVKLSGVQDGHQDISLLYTEPGAGQTHTAASFRLPAFVGQWTHLALSVAGGFVALYVDCEEFQRMPLARSSRGLELEPGAGLFVAQAGGADPDKFQGVIAELKVRRDPQVSPMHCLDEEGDDSDGASGDSGSGLGDARELLREETGAALKPRLPAPPPVTTPPLAGGSSTEDSRSEEVEEQTTVASLGAQTLPGSDSVSTWDGSVRTPGGRVKEGGLKGQKGEPGVPGPPGRAGPPGSPCLPGPPGLPCPVSPLGPAGPALQTVPGPQGPPGPPGRDGTPGRDGEPGDPGEDGKPGDTGPQGFPGTPGDVGPKGDKGDPGVGERGPPGPQGPPGPPGPSFRHDKLTFIDMEGSGFGGDLEALRGPRGFPGPPGPPGVPGLPGEPGRFGVNSSDVPGPAGLPGVPGREGPPGFPGLPGPPGPPGREGPPGRTGQKGSLGEAGAPGHKGSKGAPGPAGARGESGLAGAPGPAGPPGPPGPPGPPGPGLPAGFDDMEGSGGPFWSTARSADGPQGPPGLPGLKGDPGVPGLPGAKGEVGADGVPGFPGLPGREGIAGPQGPKGDRGSRGEKGDPGKDGVGQPGLPGPPGPPGPVVYVSEQDGSVLSVPGPEGRPGFAGFPGPAGPKGNLGSKGERGSPGPKGEKGEPGSIFSPDGGALGPAQKGAKGEPGFRGPPGPYGRPGYKGEIGFPGRPGRPGMNGLKGEKGEPGDASLGFGMRGMPGPPGPPGPPGPPGTPVYDSNVFAESSRPGPPGLPGNQGPPGPKGAKGEVGPPGPPGQFPFDFLQLEAEMKGEKGDRGDAGQKGERGEPGGGGFFGSSLPGPPGPPGPRGYPGIPGPKGESIRGQPGPPGPQGPPGIGYEGRQGPPGPPGPPGPPSFPGPHRQTISVPGPPGPPGPPGPPGTMGASSGVRLWATRQAMLGQVHEVPEGWLIFVAEQEELYVRVQNGFRKVQLEARTPLPRGTDNEVAALQPPVVQLHDSNPYPRREHPHPTARPWRADDILASPPRLPEPQPYPGAPHHSSYVHLRPARPTSPPAHSHRDFQPVLHLVALNSPLSGGMRGIRGADFQCFQQARAVGLAGTFRAFLSSRLQDLYSIVRRADRAAVPIVNLKDELLFPSWEALFSGSEGPLKPGARIFSFDGKDVLRHPTWPQKSVWHGSDPNGRRLTESYCETWRTEAPSATGQASSLLGGRLLGQSAASCHHAYIVLCIENSFMTASKXPPPGCGWPERTGGSEEAPTVGRERPASPWPQDLAAILSCIVHVSCNPQEIKGSQRVYFFKSLKQKPDADIHLPQLSPDL

SEQ ID NO: 185 - protein, 1799 aa, Homo Sapiens
  misc_feature (1713)..(1713): Xaa can be any naturally occurring amino acid
MGRDQRAVAGPALRRWLLLGTVTVGFLAQSVLAGVKKFDVPCGGRDCSGGCQCYPEKGGRGQPGPVGPQGYNGPPGLQGFPGLQGRKGDKGERGAPGVTGPKGDVGARGVSGFPGADGIPGHPGQGGPRGRPGYDGCNGTQGDSGPQGPPGSEGFTGPPGPQGPKGQKGEPYALPKEERDRYRGEPGEPGLVGFQGPPGRPGHVGQMGPVGAPGRPGPPGPPGPKGQQGNRGLGFYGVKGEKGDVGQPGPNGIPSDTLHPIIAPTGVTFHPDQYKGEKGSEGEPGIRGISLKGEEGIMGFPGLRGYPGLSGEKGSPGQKGSRGLDGYQGPDGPRGPKGEAGDPGPPGLPAYSPHPSLAKGARGDPGFPGAQGEPGSQGEPGDPGLPGPPGLSIGDGDQRRGLPGEMGPKGFIGDPGIPALYGGPPGPDGKRGPPGPPGLPGPPGPDGFLFGLKGAKGRAGFPGLPGSPGARGPKGWKGDAGECRCTEGDEAIKGLPGLPGPKGFAGINGEPGRKGDRGDPGQHGLPGFPGLKGVPGNIGAPGPKGAKGDSRTITTKGERGQPGVPGVPGMKGDDGSPGRDGLDGFPGLPGPPGDGIKGPPGDPGYPGIPGTKGTPGEMGPPGLGLPGLKGQRGFPGDAGLPGPPGFLGPPGPAGTPGQIDCDTDVKRAVGGDRQEAIQPGCIGGPKGLPGLPGPPGPTGAKGLRGIPGFAGADGGPGPRGLPGDAGREGFPGPPGFIGPRGSKGAVGLPGPDGSPGPIGLPGPDGPPGERGLPGEVLGAQPGPRGDAGVPGQPGLKGLPGDRGPPGFRGSQGMPGMPGLKGQPGLPGPSGQPGLYGPPGLHGFPGAPGQEGPLGLPGIPGREGLPGDRGDPGDTGAPGPVGMKGLSGDRGDAGFTGEQGHPGSPGFKGIDGMPGTPGLKGDRGSPGMDGFQGMPGLKGRPGFPGSKGEAGFFGIPGLKGLAGEPGFKGSRGDPGPPGPPPVILPGMKDIKGEKGDEGPMGLKGYLGAKGIQGMPGIPGLSGIPGLPGRPGHIKGVKGDIGVPGIPGLPGFPGVAGPPGITGFPGFIGSRGDKGAPGRAGLYGEIGATGDFGDIGDTINLPGRPGLKGERGTTGIPGLKGFFGEKGTEGDIGFPGITGVTGVQGPPGLKGQTGFPGLTGPPGSQGELGRIGLPGGKGDDGWPGAPGLPGFPGLRGIRGLHGLPGTKGFPGSPGSDIHGDPGFPGPPGERGDPGEANTLPGPVGVPGQKGDQGAPGERGPPGSPGLQGFPGITPPSNISGAPGDKGAPGIFGLKGYRGPPGPPGSAALPGSKGDTGNPGAPGTPGTKGWAGDSGPQGRPGVFGLPGEKGPRGEQGFMGNTGPTGAVGDRGPKGPKGDPGFPGAPGTVGAPGIAGIPQKIAVQPGTVGPQGRRGPPGAPGEMGPQGPPGEPGFRGAPGKAGPQGRGGVSAVPGFRGDEGPIGHQGPIGQEGAPGRPGSPGLPGMPGRSVSIGYLLVKHSQTDQEPMCPVGMNKLWSGYSLLYFEGQEKAHNQDLGLAGSCLARFSTMPFLYCNPGDVCYYASRNDKSYWLSTTAPLPMMPVAEDEIKPYISRCSVCEAPAIAIAVHSQDVSIPHCPAGWRSLWIGYSFLMHTAAGDEGGGQSLVSPGSCLEDFRATPFIECNGGRGTCHYYANKYSFWLTTIPEQSFQGSPSADTLKAGLIRTHISRCQVCMKNLXAGACQEGPFWCLFLTYYLRCQPKNWFYFFLKKKKVYQRNLHPAAALRPASHCHRAGASTRGPWRASPAHRKPGAALAPISPARRTA

SEQ ID NO: 186 - protein, 1697 aa, Homo Sapiens
  misc_feature (1686)..(1686): Xaa can be any naturally occurring amino acid
MKLRGVSLAAGLFLLALSLWGQPAEAAACYGCSPGSKCDCSGIKGEKGERGFPGLEGHPGLPGFPGPEGPPGPRGQKGDDGIPGPPGPKGIRGPPGLPGFPGTPGLPGMPGHDGAPGPQGIPGCNGTKGERGFPGSPGFPGLQGPPGPPGIPGMKGEPGSIIMSSLPGPKGNPGYPGPPGIQGLPGPTGIPGPIGPPGPPGLMGPPGPPGLPGPKGNMGLNFQGPKGEKGEQGLQGPPGPPGQISEQKRPIDVEFQKGDQGLPGDRGPPGPPGIRGPPGPPGGEKGEKGEQGEPGKRGKPGKDGENGQPGIPGLPGDPGYPGEPGRDGEKGQKGDTGPPGPPGLVIPRPGTGITIGEKGNIGLPGLPGEKGERGFPGIQGPPGLPGPPGAAVMGPPGPPGFPGERGQKGDEGPPGISIPGPPGLDGQPGAPGLPGPPGPAGPHIPPSDEICEPGPPGPPGSPGDKGLQGEQGVKGDKGDTCFNCIGTGISGPPGQPGLPGLPGPPGSLGFPGQKGEKGQAGATGPKGLPGIPGAPGAPGFPGSKGEPGDILTFPGMKGDKGELGSPGAPGLPGLPGTPGQDGLPGLPGPKGEPGGITFKGERGPPGNPGLPGLPGNIGPMGPPGFGPPGPVGEKGIQGVAGNPGQPGIPGPKGDPGQTITQPGKPGLPGNPGRDGDVGLPGDPGLPGQPGLPGIPGSKGEPGIPGIGLPGPPGPKGFPGIPGPPGAPGTPGRIGLEGPPGPPGFPGPKGEPGFALPGPPGPPGLPGFKGALGPKGDRGFPGPPGPPGRTGLDGLPGPKGDVGPNGQPGPMGPPGLPGIGVQGPPGPPGIPGPIGQPGLHGIPGEKGDPGPPGLDVPGPPGERGSPGIPGAPGPIGPPGSPGLPGKAGASGFPGTKGEMGMMGPPGPPGPLGIPGRSGVPGLKGDDGLQGQPGLPGPTGEKGSKGEPGLPGPPGPMDPNLLGSKGEKGEPGLPGIPGVSGPKGYQGLPGDPGQPGLSGQPGLPGPPGPKGNPGLPGQPGLIGPPGLKGTIGDMGFPGPQGVEGPPGPSGVPGQPGSPGLPGQKGDKGDPGISSIGLPGLPGPKGEPGLPGYPGNPGIKGSVGDPGLPGLPGTPGAKGQPGLPGFPGTPGPPGPKGISGPPGNPGLPGEPGPVGGGGHPGQPGPPGEKGKPGQDGIPGPAGQKGEPGQPGFGNPGPPGLPGLSGQKGDGGLPGIPGNPGLPGPKGEPGFHGFPGVQGPPGPPGSPGPALEGPKGNPGPQGPPGRPGLPGPEGPPGLPGNGGIKGEKGNPGQPGLPGLPGLKGDQGPPGLQGNPGRPGLNGMKGDPGLPGVPGFPGMKGPSGVPGSAGPEGEPGLIGPPGPPGLPGPSGQSIIIKGDAGPPGIPGQPGLKGLPGPQGPQGLPGPTGPPGDPGRNGLPGFDGAGGRKGDPGLPGQPGTRGLDGPPGPDGLQGPPGPPGTSSVAHGFLITRHSQTTDAPQCPQGTLQVYEGFSLLYVQGNKRAHGQDLGTAGSCLRRFSTMPFMFCNINNVCNFASRNDYSYWLSTPEPMPMSMQPLKGQSIQPFISRCAVCEAPAVVIAVHSQTIQIPHCPQGWDSLWIGYSFMMHTSAGAEGSGQALASPGSCLEEFRSAPFIECHGRGTCNYYANSYSFWLATVDVSDMFSKPQSETLKAGDLRTRISRCQVCMKRTXHFEEFLLCFKM

SEQ ID NO: 187 - protein, 1703 aa, Homo Sapiens
  misc_feature (1692)..(1692): Xaa can be any naturally occurring amino acid
MKLRGVSLAAGLFLLALSLWGQPAEAAACYGCSPGSKCDCSGIKGEKGERGFPGLEGHPGLPGFPGPEGPPGPRGQKGDDGIPGPPGPKGIRGPPGLPGFPGTPGLPGMPGHDGAPGPQGIPGCNGTKGERGFPGSPGFPGLQGPPGPPGIPGMKGEPGSIIMSSLPGPKGNPGYPGPPGIQGLPGPTGIPGPIGPPGPPGLMGPPGPPGLPGPKGNMGLNFQGPKGEKGEQGLQGPPGPPGQISEQKRPIDVEFQKGDQGLPGDRGPPGPPGIRGPPGPPGGEKGEKGEQGEPGKRGKPGKDGENGQPGIPGLPGDPGYPGEPGRDGEKGQKGDTGPPGPPGLVIPRPGTGITIGEKGNIGLPGLPGEKGERGFPGIQGPPGLPGPPGAAVMGPPGPPGFPGERGQKGDEGPPGISIPGPPGLDGQPGAPGLPGPPGPAGPHIPPSDEICEPGPPGPPGSPGDKGLQGEQGVKGDKGDTCFNCIGTGISGPPGQPGLPGLPGPPGSLGFPGQKGEKGQAGATGPKGLPGIPGAPGAPGFPGSKGEPGDILTFPGMKGDKGELGSPGAPGLPGLPGTPGQDGLPGLPGPKGEPGGITFKGERGPPGNPGLPGLPGNIGPMGPPGFGPPGPVGEKGIQGVAGNPGQPGIPGPKGDPGQTITQPGKPGLPGNPGRDGDVGLPGDPGLPGQPGLPGIPGSKGEPGIPGIGLPGPPGPKGFPGIPGPPGAPGTPGRIGLEGPPGPPGFPGPKGEPGFALPGPPGPPGLPGFKGALGPKGDRGFPGPPGPPGRTGLDGLPGPKGDVGPNGQPGPMGPPGLPGIGVQGPPGPPGIPGPIGQPGLHGIPGEKGDPGPPGLDVPGPPGERGSPGIPGAPGPIGPPGSPGLPGKAGASGFPGTKGEMGMMGPPGPPGPLGIPGRSGVPGLKGDDGLQGQPGLPGPTGEKGSKGEPGLPGPPGPMDPNLLGSKGEKGEPGLPGIPGVSGPKGYQGLPGDPGQPGLSGQPGLPGPPGPKGNPGLPGQPGLIGPPGLKGTIGDMGFPGPQGVEGPPGPSGVPGQPGSPGLPGQKGDKGDPGISSIGLPGLPGPKGEPGLPGYPGNPGIKGSVGDPGLPGLPGTPGAKGQPGLPGFPGTPGPPGPKGISGPPGNPGLPGEPGPVGGGGHPGQPGPPGEKGKPGQDGIPGPAGQKGEPGQPGFGNPGPPGLPGLSGQKGDGGLPGIPGNPGLPGPKGEPGFHGFPGVQGPPGPPGSPGPALEGPKGNPGPQGPPGRPGPTGFQGLPGPEGPPGLPGNGGIKGEKGNPGQPGLPGLPGLKGDQGPPGLQGNPGRPGLNGMKGDPGLPGVPGFPGMKGPSGVPGSAGPEGEPGLIGPPGPPGLPGPSGQSIIIKGDAGPPGIPGQPGLKGLPGPQGPQGLPGPTGPPGDPGRNGLPGFDGAGGRKGDPGLPGQPGTRGLDGPPGPDGLQGPPGPPGTSSVAHGFLITRHSQTTDAPQCPQGTLQVYEGFSLLYVQGNKRAHGQDLGTAGSCLRRFSTMPFMFCNINNVCNFASRNDYSYWLSTPEPMPMSMQPLKGQSIQPFISRCAVCEAPAVVIAVHSQTIQIPHCPQGWDSLWIGYSFMMHTSAGAEGSGQALASPGSCLEEFRSAPFIECHGRGTCNYYANSYSFWLATVDVSDMFSKPQSETLKAGDLRTRISRCQVCMKRTXHFEEFLLCFKM

SEQ ID NO: 188 - protein, 1067 aa, Homo Sapiens
  misc_feature (1029)..(1029): Xaa can be any naturally occurring amino acid
MRAARALLPLLLQACWTAAQDEPETPRAVAFQDCPVDLFFVLDTSESVALRLKPYGALVDKVKSFTKRFIDNLRDRYYRCDRNLVWNAGALHYSDEVEIIQGLTRMPGGRDALKSSVDAVKYFGKGTYTDCAIKKGLEQLLVGGSHLKENKYLIVVTDGHPLEGYKEPCGGLEDAVNEAKHLGVKVFSVAITPDHLEPRLSIIATDHTYRRNFTAADWGQSRDAEEAISQTIDTIVDMIKNNVEQVCCSFECQPARGPPGLRGDPGFEGERGKPGLPGEKGEAGDPGRPGDLGPVGYQGMKGEKGSRGEKGSRGPKGYKGEKGKRGIDGVDGVKGEMGYPGLPGCKGSPGFDGIQGPPGPKGDPGAFGLKGEKGEPGADGEAGRPGSSGPSGDEGQPGEPGPPGEKGEAGDEGNPGPDGAPGERGGPGERGPRGTPGTRGPRGDPGEAGPQGDQGREGPVGVPGDPGEAGPIGPKGYRGDEGPPGSEGARGAPGPAGPPGDPGLMGERGEDGPAGNGTEGFPGFPGYPGNRGAPGINGTKGYPGLKGDEGEAGDPGDDNNDIAPRGVKGAKGYRGPEGPQGPPGHQGPPGPDECEILDIIMKMCSCCECKCGPIDLLFVLDSSESIGLQNFEIAKDFVVKVIDRLSRDELVKFEPGQSYAGVVQYSHSQMQEHVSLRSPSIRNVQELKEAIKSLQWMAGGTFTGEALQYTRDQLLPPSPNNRIALVITDGRSDTQRDTTPLNVLCSPGIQVVSVGIKDVFDFIPGSDQLNVISCQGLAPSQGRPGLSLVKENYAELLEDAFLKNVTAQICIDKKCPDYTCPITFSSPADITILLDGSASVGSHNFDTTKRFAKRLAERFLTAGRTDPAHDVRVAVVQYSGTGQQRPERASLQFLQNYTALASAVDAMDFINDATDVNDALGYVTRFYREASSGAAKKRLLLFSDGNSQGATPAAIEKAVQEAQRAGIEIFVVVVGRQVNEPHIRVLVTGKTAEYDVAYGESHLFRVPSYQALLRGVFHQTVSRKVALGXPTLHAGTKPCPPTPPHSSLNRVKCDANFPDQPDSLDFF

SEQ ID NO: 189 - protein, 71 aa, Homo Sapiens
  misc_feature (64)..(64): Xaa can be any naturally occurring amino acid
MPGLVDSNPAPPESQEKKPLKPCCACPETKKARDACIIEKGEEHCGHLIEAHKECMRALGFKIXNGGLLCE

SEQ ID NO: 190 - protein, 172 aa, Homo Sapiens
  misc_feature (138)..(138): Xaa can be any naturally occurring amino acid
MPNFAGTWKMRSSENFDELLKALGVNAMLRKVAVAAASKPHVEIRQDGDQFYIKTSTTVRTTEINFKVGEGFEEETVDGRKCRSLATWENENKIHCTQTLLEGDGPKTYWTRELANDELILTFGADDVVCTRIYVREXRQLACSYFQEGMQVPEEYVIVLSCQWTALFPYQY

SEQ ID NO: 191 - protein, 216 aa, Homo Sapiens
  misc_feature (200)..(200): Xaa can be any naturally occurring amino acid
MEARDKQVLRSLRLELGAEVLVEGLVLQYLYQEGILTENHIQEINAQTTGLRKTMLLLDILPSRGPKAFDTFLDSLQEFPWVREKLKKAREEAMTDLPAGDRLTGIPSHILNSSPSDRQINQLAQRLGPEWEPMVLSLGLSQTDIYRCKANHPHNVQSQVVEAFIRWRQRFGKQATFQSLHNGLRAVEVDPSLLLHMLEXWCLQQPLGSVSLSHVG

SEQ ID NO: 192 - protein, 2465 aa, Homo Sapiens
  misc_feature (2443)..(2443): Xaa can be any naturally occurring amino acid
MAENLLDGPPNPKRAKLSSPGFSANDSTDFGSLFDLENDLPDELIPNGGELGLLNSGNLVPDAASKHKQLSELLRGGSGSSINPGIGNVSASSPVQQGLGGQAQGQPNSANMASLSAMGKSPLSQGDSSAPSLPKQAASTSGPTPAASQALNPQAQKQVGLATSSPATSQTGPGICMNANFNQTHPGLLNSNSGHSLINQASQGQAQVMNGSLGAAGRGRGAGMPYPTPAMQGASSSVLAETLTQVSPQMTGHAGLNTAQAGGMAKMGITGNTSPFGQPFSQAGGQPMGATGVNPQLASKQSMVNSLPTFPTDIKNTSVTNVPNMSQMQTSVGIVPTQAIATGPTADPEKRKLIQQQLVLLLHAHKCQRREQANGEVRACSLPHCRTMKNVLNHMTHCQAGKACQVAHCASSRQIISHWKNCTRHDCPVCLPLKNASDKRNQQTILGSPASGIQNTIGSVGTGQQNATSLSNPNPIDPSSMQRAYAALGLPYMNQPQTQLQPQVPGQQPAQPQTHQQMRTLNPLGNNPMNIPAGGITTDQQPPNLISESALPTSLGATNPLMNDGSNSGNIGTLSTIPTAAPPSSTGVRKGWHEHVTQDLRSHLVHKLVQAIFPTPDPAALKDRRMENLVAYAKKVEGDMYESANSRDEYYHLLAEKIYKIQKELEEKRRSRLHKQGILGNQPALPAPGAQPPVIPQAQPVRPPNGPLSLPVNRMQVSQGMNSFNPMSLGNVQLPQAPMGPRAASPMNHSVQMNSMGSVPGMAISPSRMPQPPNMMGAHTNNMMAQAPAQSQFLPQNQFPSSSGAMSVGMGQPPAQTGVSQGQVPGAALPNPLNMLGPQASQLPCPPVTQSPLHPTPPPASTAAGMPSLQHTTPPGMTPPQPAAPTQPSTPVSSSGQTPTPTPGSVPSATQTQSTPTVQAAAQAQVTPQPQTPVQPPSVATPQSSQQQPTPVHAQPPGTPLSQAAASIDNRVPTPSSVASAETNSQQPGPDVPVLEMKTETQAEDTEPDPGESKGEPRSEMMEEDLQGASQVKEETDIAEQKSEPMEVDEKKPEVKVEVKEEEESSSNGTASQSTSPSQPRKKIFKPEELRQALMPTLEALYRQDPESLPFRQPVDPQLLGIPDYFDIVKNPMDLSTIKRKLDTGQYQEPWQYVDDVWLMFNNAWLYNRKTSRVYKFCSKLAEVFEQEIDPVMQSLGYCCGRKYEFSPQTLCCYGKQLCTIPRDAAYYSYQNRYHFCEKCFTEIQGENVTLGDDPSQPQTTISKDQFEKKKNDTLDPEPFVDCKECGRKMHQICVLHYDIIWPSGFVCDNCLKKTGRPRKENKFSAKRLQTTRLGNHLEDRVNKFLRRQNHPEAGEVFVRVVASSDKTVEVKPGMKSRFVDSGEMSESFPYRTKALFAFEEIDGVDVCFFGMHVQEYGSDCPPPNTRRVYISYLDSIHFFRPRCLRTAVYHEILIGYLEYVKKLGYVTGHIWACPPSEGDDYIFHCHPPDQKIPKPKRLQEWYKKMLDKAFAERIIHDYKDIFKQATEDRLTSAKELPYFEGDFWPNVLEESIKELEQEEEERKKEESTAASETTEGSQGDSKNAKKKNNKKTNKNKSSISRANKKKPSMPNVSNDLSQKLYATMEKHKEVFFVIHLHAGPVINTLPPIVDPDPLLSCDLMDGRDAFLTLARDKHWEFSSLRRSKWSTLCMLVELHTQGQDRFVYTCNECKHHVETRWHCTVCEDYDLCINCYNTKSHAHKMVKWGLGLDDEGSSQGEPQSKSPQESRRLSIQRCIQSLVHACQCRNANCSLPSCQKMKRVVQHTKGCKRKTNGGCPVCKQLIALCCYHAKHCQENKCPVPFCLNIKHKLRQQQIQHRLQQAQLMRRRMATMNTRNVPQQSLPSPTSAPPGTPTQQPSTPQTPQPPAQPQPSPVSMSPAGFPSVARTQPPTTVSTGKPTSQVPAPPPPAQPPPAAVEAARQIEREAQQQQHLYRVNINNSMPPGRTGMGTPGSQMAPVSLNVPRPNQVSGPVMPSMPPGQWQQAPLPQQQPMPGLPRPVISMQAQAAVAGPRMPSVQPPRSISPSALQDLLRTLKSPSSPQQQQQVLNILKSNPQLMAAFIKQRTAKYVANQPGMQPQPGLQSQPGMQPQPGMHQQPSLQNLNAMQAGVPRPGVPPQQQAMGGLNPQGQALNIMNPGHNPNMASMNPQYREMLRRQLLQQQQQQQQQQQQQQQQQQGSAGMAGGMAGHGQFQQPQGPGGYPPAMQQQQRMQQHLPLQGSSMGQMAAQMGQLGQMGQPGLGADSTPNIQQALQQRILQQQQMKQQIGSPGQPNPMSPQQHMLSGQPQASHLPGQQIATSLSNQVRSPAPVQSPRPQSQPPHSSPSPRIQPQPSPHHVSPQTGSPHPGLAVTMASSIDQGHLGNPEQSAMLPQLNTPSRSALSSELSLVGDTTGDTLEKFVEGLXHCESITFSLSCSWTFCTENPGI

SEQ ID NO: 193 - protein, 194 aa, Homo Sapiens
  misc_feature (176)..(176): Xaa can be any naturally occurring amino acid
MDIAIHHPWIRRPFFPFHSPSRLFDQFFGEHLLESDLFPTSTSLSPFYLRPPSFLRAPSWFDTGLSEMRLEKDRFSVNLDVKHFSPEELKVKVLGDVIEVHGKHEERQDEHGFISREFHRKYRIPADVDPLTITSSLSSDGVLTVNGPRKQVSGPERTIPITREEKPAVTAAPKKXMPFLELHFLKQESFPTSE

SEQ ID NO: 194 - protein, 976 aa, Homo Sapiens
  misc_feature (972)..(972): Xaa can be any naturally occurring amino acid
MELSDANLQTLTEYLKKTLDPDPAIRRPAEKFLESVEGNQNYPLLLLTLLEKSQDNVIKVCASVTFKNYIKRNWRIVEDEPNKICEADRVAIKANIVHLMLSSPEQIQKQLSDAISIIGREDFPQKWPDLLTEMVNRFQSGDFHVINGVLRTAHSLFKRYRHEFKSNELWTEIKLVLDAFALPLTNLFKATIELCSTHANDASALRILFSSLILISKLFYSLNFQDLPEFFEDNMETWMNNFHTLLTLDNKLLQTDDEEEAGLLELLKSQICDNAALYAQKYDEEFQRYLPRFVTAIWNLLVTTGQEVKYDLLVSNAIQFLASVCERPHYKNLFEDQNTLTSICEKVIVPNMEFRAADEEAFEDNSEEYIRRDLEGSDIDTRRRAACDLVRGLCKFFEGPVTGIFSGYVNSMLQEYAKNPSVNWKHKDAAIYLVTSLASKAQTQKHGITQANELVNLTEFFVNHILPDLKSANVNEFPVLKADGIKYIMIFRNQVPKEHLLVSIPLLINHLQAESIVVHTYAAHALERLFTMRGPNNATLFTAAEIAPFVEILLTNLFKALTLPGSSENEYIMKAIMRSFSLLQEAIIPYIPTLITQLTQKLLAVSKNPSKPHFNHYMFEAICLSIRITCKANPAAVVNFEEALFLVFTEILQNDVQEFIPYVFQVMSLLLETHKNDIPSSYMALFPHLLQPVLWERTGNIPALVRLLQAFLERGSNTIASAAADKIPGLLGVFQKLIASKANDHQGFYLLNSIIEHMPPESVDQYRKQIFILLFQRLQNSKTTKFIKSFLVFINLYCIKYGALALQEIFDGIQPKMFGMVLEKIIIPEIQKVSGNVEKKICAVGITKLLTECPPMMDTEYTKLWTPLLQSLIGLFELPEDDTIPDEEHFIDIEDTPGYQTAFSQLAFAGKKEHDPVGQMVNNPKIHLAQSLHKLSTACPGRVPSMVSTSLNAEALQYLQGYLQAASVTLLXTAFF

SEQ ID NO: 195 - protein, 1015 aa, Homo Sapiens
  misc_feature (973)..(973): Xaa can be any naturally occurring amino acid
MGPGVLLLLLVATAWHGQGIPVIEPSVPELVVKPGATVTLRCVGNGSVEWDGPPSPHWTLYSDGSSSILSTNNATFQNTGTYRCTEPGDPLGGSAAIHLYVKDPARPWNVLAQEVVVFEDQDALLPCLLTDPVLEAGVSLVRVRGRPLMRHTNYSFSPWHGFTIHRAKFIQSQDYQCSALMGGRKVMSISIRLKVQKVIPGPPALTLVPAELVRIRGEAAQIVCSASSVDVNFDVFLQHNNTKLAIPQQSDFHNNRYQKVLTLNLDQVDFQHAGNYSCVASNVQGKHSTSMFFRVVESAYLNLSSEQNLIQEVTVGEGLNLKVMVEAYPGLQGFNWTYLGPFSDHQPEPKLANATTKDTYRHTFTLSLPRLKPSEAGRYSFLARNPGGWRALTFELTLRYPPEVSVIWTFINGSGTLLCAASGYPQPNVTWLQCSGHTDRCDEAQVLQVWDDPYPEVLSQEPFHKVTVQSLLTVETLEHNQTYECRAHNSVGSGSWAFIPISAGAHTHPPDEFLFTPVVVACMSIMALLLLLLLLLLYKYKQKPKYQVRWKIIESYEGNSYTFIDPTQLPYNEKWEFPRNNLQFGKTLGAGAFGKVVEATAFGLGKEDAVLKVAVKMLKSTAHADEKEALMSELKIMSHLGQHENIVNLLGACTHGGPVLVITEYCCYGDLLNFLRRKAEAMLGPSLSPGQDPEGGVDYKNIHLEKKYVRRDSGFSSQGVDTYVEMRPVSTSSNDSFSEQDLDKEDGRPLELRDLLHFSSQVAQGMAFLASKNCIHRDVAARNVLLTNGHVAKIGDFGLARDIMNDSNYIVKGNARLPVKWMAPESIFDCVYTVQSDVWSYGILLWEIFSLGLNPYPGILVNSKFYKLVKDGYQMAQPAFAPKNIYSIMQACWALEPTHRPTFQQICSFLQEQAQEDRRERDYTNLPSSSRSGGSGSSSSELEEESSSEHLTCCEQGDIAQPLLQPNNYQFCXGVDDREYHSPLLQTSTPPWMGRHGENIQTLPSVISLNSSAQL

SEQ ID NO: 196 - protein, 426 aa, Homo Sapiens
  misc_feature (401)..(401): Xaa can be any naturally occurring amino acid
MLLLVTSLLLCELPHPAFLLIPEKSDLRTVAPASSLNVRFDSRTMNLSWDCQENTTFSKCFLTDKKNRVVEPRLSNNECSCTFREICLHEGVTFEVHVNTSQRGFQQKLLYPNSGREGTAAQNFSCFIYNADLMNCTWARGPTAPRDVQYFLYIRNSKRRREIRCPYYIQDSGTHVGCHLDNLSGLTSRNYFLVNGTSREIGIQFFDSLLDTKKIERFNPPSNVTVRCNTTHCLVRWKQPRTYQKLSYLDFQYQLDVHRKNTQPGTENLLINVSGDLENRYNFPSSEPRAKHSVKIRAADVRILNWSSWSEAIEFGSDDGNLGSVYIYVLLIVGTLVCGIVLGFLFKRFLRIQRLFPPVPQIKDKLNDNHEVEDEIIWEEFTPEEGKGYREEVLTVKEITXDPEGVGMAWTSPPPRHGGTVFLMML

SEQ ID NO: 197 - protein, 361 aa, Homo Sapiens
  misc_feature (334)..(334): Xaa can be any naturally occurring amino acid
MLLLVTSLLLCELPHPAFLLIPEKSDLRTVAPASSLNVRFDSRTMNLSWDCQENTTFSKCFLTDKKNRVVEPRLSNNECSCTFREICLHEGVTFEVHVNTSQRGFQQKLLYPNSGREGTAAQNFSCFIYNADLMNCTWARGPTAPRDVQYFLYIRNSKRRREIRCPYYIQDSGTHVGCHLDNLSGLTSRNYFLVNGTSREIGIQFFDSLLDTKKIERFNPPSNVTVRCNTTHCLVRWKQPRTYQKLSYLDFQYQLDVHRKNTQPGTENLLINVSGDLENRYNFPSSEPRAKHSVKIRAADVRILNWSSWSEAIEFGSLGYSGCSRQFHRSKTNXMITMRWKTRSSGRNSPQRKGKATAKRS

SEQ ID NO: 198 - protein, 261 aa, Homo Sapiens
  misc_feature (234)..(234): Xaa can be any naturally occurring amino acid
MLLLVTSLLLCELPHPAFLLIPEKSDLRTVAPASSLNVRFDSRTMNLSWDCQENTTFSKCFLTDKKNRVVEPRLSNNECSCTFREICLHEGVTFEVHVNTSQRGFQQKLLYPNSGREGTAAQNFSCFIYNADLMNCTWARGPTAPRDVQYFLYIRNSKRRREIRCPYYIQDSGTHVGCHLDNLSGLTSRNYFLVNGTSREIGIQFFDSLLDTKKIGSLGYSGCSRQFHRSKTNXMITMRWKTRSSGRNSPQRKGKATAKRS

SEQ ID NO: 199 - protein, 445 aa, Homo Sapiens
  misc_feature (417)..(417): Xaa can be any naturally occurring amino acid
MELRVGNKYRLGRKIGSGSFGDIYLGANIASGEEVAIKLECVKTKHPQLHIESKFYKMMQGGVGIPSIKWCGAEGDYNVMVMELLGPSLEDLFNFCSRKFSLKTVLLLADQMISRIEYIHSKNFIHRDVKPDNFLMGLGKKGNLVYIIDFGLAKKYRDARTHQHIPYRENKNLTGTARYASINTHLGIEQSRRDDLESLGYVLMYFNLGSLPWQGLKAATKRQKYERISEKKMSTPIEVLCKGYPSEFSTYLNFCRSLRFDDKPDYSYLRQLFRNLFHRQGFSYDYVFDWNMLKFGAARNPEDVDRERREHEREERMGQLRGSATRALPPGPPTGATANRLRSAAEPVASTPASRIQPAGNTSPRAISRVDRERKVSMRLHRGAPANVSSSDLTGRQEVSRIPASQTSVPFDHLGKXGEPPLDQCLLSVFTVFSLKKKKKKKRQK

SEQ ID NO: 200 - protein, 416 aa, Homo Sapiens
  misc_feature (351)..(351): Xaa can be any naturally occurring amino acid
MPGPAAGSRARVYAEVNSLRSREYWDYEAHVPSWGNQDDYQLVRKLGRGKYSEVFEAINITNNERVVVKILKPVKKKKIKREVKILENLRGGTNIIKLIDTVKDPVSKTPALVFEYINNTDFKQLYQILTDFDIRFYMYELLKALDYCHSKGIMHRDVKPHNVMIDHQQKKLRLIDWGLAEFYHPAQEYNVRVASRYFKGPELLVDYQMYDYSLDMWSLGCMLASMIFRREPFFHGQDNYDQLVRIAKVLGTEELYGYLKKYHIDLDPHFNDILGQHSRKRWENFIHSENRHLVSPEALDLLDKLLRYDHQQRLTAKEAMEHPYFYPVVKEQSQPCADNAVLSSGLTAARXRLESDGSVAVLPLFHKQNKNQIKRLNAYREITFREQTQNGGRFGEHELDQAKGSPPPYIKPHFRM

SEQ ID NO: 201 - protein, 242 aa, Homo Sapiens
  misc_feature (216)..(216): Xaa can be any naturally occurring amino acid
MSSSEEVSWISWFCGLRGNEFFCEVDEDYIQDKFNLTGLNEQVPHYRQALDMILDLEPDEELEDNPNQSDLIEQAAEMLYGLIHARYILTNRGIAQMLEKYQQGDFGYCPRVYCENQPMLPIGLSDIPGEAMVKLYCPKCMDVYTPKSSRHHHTDGAYFGTGFPHMLFMVHPEYRPKRPANQFVPRLYGFKIHPMAYQLQLQAASNFKSPVKTIRXFPPPPVLQSLTFPFFFATLSGTLYGF

SEQ ID NO: 202 - protein, 106 aa, Homo Sapiens
  misc_feature (99)..(99): Xaa can be any naturally occurring amino acid
MIPGGLSEAKPATPEIQEIVDKVKPQLEEKTNETYGKLEAVQYKTQVVAGTNYYIKVRAGDNKYMHLKVFKSLPGQNEDLVLTGYQVDKNKDDELTGFXQHVPKVF

SEQ ID NO: 203 - protein, 188 aa, Homo Sapiens
  misc_feature (181)..(181): Xaa can be any naturally occurring amino acid
MQAEGRGTGGSTGDADGPGGPGIPDGPGGNAGGPGEAGATGGRGPRGAGAARASGPGGGAPRGPHGGAASGLNGCCRCGARGPESRLLEFYLAMPFATPMEAELARRSLAQDAPPLPVPGVLLKEFTVSGNILTIRLTAADHRQLQLSISSCLQQLSLLMWITQCFLPVFLAQPPSGQRRXAQPGAPS

SEQ ID NO: 204 - protein, 785 aa, Homo Sapiens
  misc_feature (782)..(782): Xaa can be any naturally occurring amino acid
MATQADLMELDMAMEPDRKAAVSHWQQQSYLDSGIHSGATTTAPSLSGKGNPEEEDVDTSQVLYEWEQGFSQSFTQEQVADIDGQYAMTRAQRVRAAMFPETLDEGMQIPSTQFDAAHPTNVQRLAEPSQMLKHAVVNLINYQDDAELATRAIPELTKLLNDEDQVVVNKAAVMVHQLSKKEASRHAIMRSPQMVSAIVRTMQNTNDVETARCTAGTLHNLSHHREGLLAIFKSGGIPALVKMLGSPVDSVLFYAITTLHNLLLHQEGAKMAVRLAGGLQKMVALLNKTNVKFLAITTDCLQILAYGNQESKLIILASGGPQALVNIMRTYTYEKLLWTTSRVLKVLSVCSSNKPAIVEAGGMQALGLHLTDPSQRLVQNCLWTLRNLSDAATKQEGMEGLLGTLVQLLGSDDINVVTCAAGILSNLTCNNYKNKMMVCQVGGIEALVRTVLRAGDREDITEPAICALRHLTSRHQEAEMAQNAVRLHYGLPVVVKLLHPPSHWPLIKATVGLIRNLALCPANHAPLREQGAIPRLVQLLVRAHQDTQRRTSMGGTQQQFVEGVRMEEIVEGCTGALHILARDVHNRIVIRGLNTIPLFVQLLYSPIENIQRVAAGVLCELAQDKEAAEAIEAEGATAPLTELLHSRNEGVATYAAAVLFRMSEDKPQDYKKRLSVELTSSLFRTEPMAWNETADLGLDIGAQGEPLGYRQDDPSYRSFHSGGYGQDALGMDPMMEHEMGGHHPGADYPVDGLPDLGHAQDLMDGLPPGDSNQLAWFDTDLXIIL

SEQ ID NO: 205 - protein, 775 aa, Homo Sapiens
  misc_feature (746)..(746): Xaa can be any naturally occurring amino acid
MSLKPRVVDFDETWNKLLTTIKAVVMLEYVERATWNDRFSDIYALCVAYPEPLGERLYTETKIFLENHVRHLHKRVLESEEQVLVMYHRYWEEYSKGADYMDCLYRYLNTQFIKKNKLTEADLQYGYGGVDMNEPLMEIGELALDMWRKLMVEPLQAILIRMLLREIKNDRGGEDPNQKVIHGVINSFVHVEQYKKKFPLKFYQEIFESPFLTETGEYYKQEASNLLQESNCSQYMEKVLGRLKDEEIRCRKYLHPSSYTKVIHECQQRMVADHLQFLHAECHNIIRQEKKNDMANMYVLLRAVSTGLPHMIQELQNHIHDEGLRATSNLTQENMPTLFVESVLEVHGKFVQLINTVLNGDQHFMSALDKALTSVVNYREPKSVCKAPELLAKYCDNLLKKSAKGMTENEVEDRLTSFITVFKYIDDKDVFQKFYARMLAKRLIHGLSMSMDSEEAMINKLKQACGYEFTSKLHRMYTDMSVSADLNNKFNNFIKNQDTVIDLGISFQIYVLQAGAWPLTQAPSSTFAIPQELEKSVQMFELFYSQHFSGRKLTWLHYLCTGEVKMNYLGKPYVAMVTTYQMAVLLAFNNSETVSYKELQDSTQMNEKELTKTIKSLLDVKMINHDSEKEDIDAESSFSLNMNFSSKRTKFKITTSMQKDTPQEMEQTRSAVDEDRKMYLQAAIVRIMKARKVLRHNALIQEVISQSRARFNPSISMIKKCIEVLIDKQYIERSQASADEYSYVAXCRSPPAWCEKIIAITIWCVPVGKSRTVPP

SEQ ID NO: 206 - protein, 120 aa, Homo Sapiens
  misc_feature (108)..(108): Xaa can be any naturally occurring amino acid
MARAALSAAPSNPRLLRVALLLLLLVAAGRRAAGASVATELRCQCLQTLQGIHPKNIQSVNVKSPGPHCAQTEVIATLKNGRKACLNPASPIVKKIIEKMLNSDKSNXPEGRRKLTGGCS

SEQ ID NO: 207 - protein, 120 aa, Homo Sapiens
  misc_feature (108)..(108): Xaa can be any naturally occurring amino acid
MARATLSAAPSNPRLLRVALLLLLLVAASRRAAGAPLATELRCQCLQTLQGIHLKNIQSVKVKSPGPHCAQTEVIATLKNGQKACLNPASPMVKKIIEKMLKNGKSNXPEGRRKLIGGCS

SEQ ID NO: 208 - protein, 136 aa, Homo Sapiens
  misc_feature (126)..(126): Xaa can be any naturally occurring amino acid
MKKSGVLFLLGIILLVLIGVQGTPVVRKGRCSCISTNQGTIHLQSLKDLKQFAPSPSCEKIEIIATLKNGVQTCLNPDSADVKELIKKWEKQVSQKKKQKNGKKHQKKKVLKVRKSQRSRQKKTTXETTSPISILC

SEQ ID NO: 209 - protein, 367 aa, Homo Sapiens
  misc_feature (357)..(357): Xaa can be any naturally occurring amino acid
MSIPLPLLQIYTSDNYTEEMGSGDYDSMKEPCFREENANFNKIFLPTIYSIIFLTGIVGNGLVILVMGYQKKLRSMTDKYRLHLSVADLLFVITLPFWAVDAVANWYFGNFLCKAVHVIYTVNLYSSVLILAFISLDRYLAIVHATNSQRPRKLLAEKVVYVGVWIPALLLTIPDFIFANVSEADDRYICDRFYPNDLWVVVFQFQHIMVGLILPGIVILSCYCIIISKLSHSKGHQKRKALKTTVILILAFFACWLPYYIGISIDSFILLEIIKQGCEFENTVHKWISITEALAFFHCCLNPILYAFLGAKFKTSAQHALTSVSRGSSLKILSKGKRGGHSSVSTESESSSFHSSXHRCKRLFFIR

SEQ ID NO: 210 - protein, 363 aa, Homo Sapiens
  misc_feature (353)..(353): Xaa can be any naturally occurring amino acid
MEGISIYTSDNYTEEMGSGDYDSMKEPCFREENANFNKIFLPTIYSIIFLTGIVGNGLVILVMGYQKKLRSMTDKYRLHLSVADLLFVITLPFWAVDAVANWYFGNFLCKAVHVIYTVNLYSSVLILAFISLDRYLAIVHATNSQRPRKLLAEKVVYVGVWIPALLLTIPDFIFANVSEADDRYICDRFYPNDLWVVVFQFQHIMVGLILPGIVILSCYCIIISKLSHSKGHQKRKALKTTVILILAFFACWLPYYIGISIDSFILLEIIKQGCEFENTVHKWISITEALAFFHCCLNPILYAFLGAKFKTSAQHALTSVSRGSSLKILSKGKRGGHSSVSTESESSSFHSSXHRCKRLFFIR

SEQ ID NO: 211 - protein, 343 aa, Homo Sapiens
  misc_feature (302)..(302): Xaa can be any naturally occurring amino acid
MGAQLSTLGHMVLFPVWFLYSLLMKLFQRSTPAITLESPDIKYPLRLIDREIISHDTRRFRFALPSPQHILGLPVGQHIYLSARIDGNLVVRPYTPISSDDDKGFVDLVIKVYFKDTHPKFPAGGKMSQYLESMQIGDTIEFRGPSGLLVYQGKGKFAIRPDKKSNPIIRTVKSVGMIAGGTGITPMLQVIRAIMKDPDDHTVCHLLFANQTEKDILLRPELEELRNKHSARFKLWYTLDRAPEAWDYGQGFVNEEMIRDHLPPPEEEPLVLMCGPPPMIQYACLPNLDHVGHPTERCFVFXGPGTVTRPPAPRTPRPVHAHPVTSPHRTLGPRVQPGLPVPW

SEQ ID NO: 212 - protein, 534 aa, Homo Sapiens
  misc_feature (504)..(504): Xaa can be any naturally occurring amino acid
MVLEMLNPIHYNITSIVPEAMPAATMPVLLLTGLFLLVWNYEGTSSIPGPGYCMGIGPLISHGRFLWMGIGSACNYYNRVYGEFMRVWISGEETLIISKSSSMFHIMKHNHYSSRFGSKLGLQCIGMHEKGIIFNNNPELWKTTRPFFMKALSGPGLVRMVTVCAESLKTHLDRLEEVTNESGYVDVLTLLRRVMLDTSNTLFLRIPLDESAIVVKIQGYFDAWQALLIKPDIFFKISWLYKKYEKSVKDLKDAIEVLIAEKRRRISTEEKLEECMDFATELILAEKRGDLTRENVNQCILEMLIAAPDTMSVSLFFMLFLIAKHPNVEEAIIKEIQTVIGERDIKIDDIQKLKVMENFIYESMRYQPVVDLVMRKALEDDVIDGYPVKKGTNIILNIGRMHRLEFFPKPNEFTLENFAKNVPYRYFQPFGFGPRGCAGKYIAMVMMKAILVTLLRRFHVKTLQGQCVESIQKIHDLSLHPDETKNMLEMIFTPRNSDRCLEHXRRLVSTYSGAFLISSSHTNHPSLPIVSSSQ

SEQ ID NO: 213 - protein, 545 aa, Homo Sapiens
  misc_feature (517)..(517): Xaa can be any naturally occurring amino acid
MALSQSVPFSATELLLASAIFCLVFWVLKGLRPRVPKGLKSPPEPWGWPLLGHVLTLGKNPHLALSRMSQRYGDVLQIRIGSTPVLVLSRLDTIRQALVRQGDDFKGRPDLYTSTLITDGQSLTFSTDSGPVWAARRRLAQNALNTFSIASDPASSSSCYLEEHVSKEAKALISRLQELMAGPGHFDPYNQVVVSVANVIGAMCFGQHFPESSDEMLSLVKNTHEFVETASSGNPLDFFPILRYLPNPALQRFKAFNQRFLWFLQKTVQEHYQDFDKNSVRDITGALFKHSKKGPRASGNLIPQEKIVNLVNDIFGAGFDTVTTAISWSLMYLVTKPEIQRKIQKELDTVIGRERRPRLSDRPQLPYLEAFILETFRHSSFLPFTIPHSTTRDTTLNGFYIPKKCCVFVNQWQVNHDPELWEDPSEFRPERFLTADGTAINKPLSEKMMLFGMGKRRCIGEVLAKWEIFLFLAILLQQLEFSVPPGVKVDLTPIYGLTMKHARCEHVQARLRFSINXRRHHHSEARERVGASHGDSALVSLPFFF

SEQ ID NO: 214 - protein, 525 aa, Homo Sapiens
  misc_feature (494)..(494): Xaa can be any naturally occurring amino acid
MSALGVTVALLVWAAFLLLVSMWRQVHSSWNLPPGPFPLPIIGNLFQLELKNIPKSFTRLAQRFGPVFTLYVGSQRMVVMHGYKAVKEALLDYKDEFSGRGDLPAFHAHRDRGIIFNNGPTWKDIRRFSLTTLRNYGMGKQGNESRIQREAHFLLEALRKTQGQPFDPTFLIGCAPCNVIADILFRKHFDYNDEKFLRLMYLFNENFHLLSTPWLQLYNNFPSFLHYLPGSHRKVIKNVAEVKEYVSERVKEHHQSLDPNCPRDLTDCLLVEMEKEKHSAERLYTMDGITVTVADLFFAGTETTSTTLRYGLLILMKYPEIEEKLHEEIDRVIGPSRIPAIKDRQEMPYMDAVVHEIQRFITLVPSNLPHEATRDTIFRGYLIPKGTVVVPTLDSVLYDNQEFPDPEKFKPEHFLNENGKFKYSDYFKPFSTGKRVCAGEGLARMELFLLLCAILQHFNLKPLVDPKDIDLSPIHIGFGCIPPRYKLCVIPRSXVCGGHPEPPAFKQVFKLFEVRISQTDSFLCI

SEQ ID NO: 215 - protein, 530 aa, Homo Sapiens
  misc_feature (504)..(504): Xaa can be any naturally occurring amino acid
MALIPDLAMETWLLLAVSLVLLYLYGTHSHGLFKKLGIPGPTPLPFLGNILSYHKGFCMFDMECHKKYGKVWGFYDGQQPVLAITDPDMIKTVLVKECYSVFTNRRPFGPVGFMKSAISIAEDEEWKRLRSLLSPTFTSGKLKEMVPIIAQYGDVLVRNLRREAETGKPVTLKDVFGAYSMDVITSTSFGVNIDSLNNPQDPFVENTKKLLRFDFLDPFFLSITVFPFLIPILEVLNICVFPREVTNFLRKSVKRMKESRLEDTQKHRVDFLQLMIDSQNSKETESHKALSDLELVAQSIIFIFAGYETTSSVLSFIMYELATHPDVQQKLQEEIDAVLPNKAPPTYDTVLQMEYLDMVVNETLRLFPIAMRLERVCKKDVEINGMFIPKGVVVMIPSYALHRDPKYWTEPEKFLPERFSKKNKDNIDPYIYTPFGSGPRNCIGMRFALMNMKLALIRVLQNFSFKPCKETQIPLKLSLGGLLQPEKPVVLKVESRDGTVSGAXIFLRTSALLFKKSVPENTRDLKLLCE

SEQ ID NO: 216 - protein, 532 aa, Homo Sapiens
  misc_feature (503)..(503): Xaa can be any naturally occurring amino acid
MDLIPNLAVETWLLLAVSLVLLYLYGTRTHGLFKRLGIPGPTPLPLLGNVLSYRQGLWKFDTECYKKYGKMWGTYEGQLPVLAITDPDVIRTVLVKECYSVFTNRRSLGPVGFMKSAISLAEDEEWKRIRSLLSPTFTSGKLKEMFPIIAQYGDVLVRNLRREAEKGKPVTLKDIFGAYSMDVITGTSFGVNIDSLNNPQDPFVESTKKFLKFGFLDPLFLSIILFPFLTPVFEALNVSLFPKDTINFLSKSVNRMKKSRLNDKQKHRLDFLQLMIDSQNSKETESHKALSDLELAAQSIIFIFAGYETTSSVLSFTLYELATHPDVQQKLQKEIDAVLPNKAPPTYDAVVQMEYLDMVVNETLRLFPVAIRLERTCKKDVEINGVFIPKGSMVVIPTYALHHDPKYWTEPEEFRPERFSKKKDSIDPYIYTPFGTGPRNCIGMRFALMNMKLALIRVLQNFSFKPCKETQIPLKLDTQGLLQPEKPIVLKVDSRDGTLSGEXVILRISTLVFKKAVPQNTRDFNLVNKTLK

SEQ ID NO: 217 - protein, 123 aa, Homo Sapiens
  misc_feature (114)..(114): Xaa can be any naturally occurring amino acid
MSASVVSVISRFLEEYLSSTPQRLKLLDAYLLYILLTGALQFGYCLLVGTFPFNSFLSGFISCVGSFILAVCLRIQINPQNKADFQGISPERAFADFLFASTILHLVVMNFVGXIILIYLIEE

SEQ ID NO: 218 - protein, 763 aa, Homo Sapiens
  misc_feature (741)..(741): Xaa can be any naturally occurring amino acid
MATANSIIVLDDDDEDEAAAQPGPSHPLPNAASPGAEAPSSSEPHGARGSSSSGGKKCYKLENEKLFEEFLELCKMQTADHPEVVPFLYNRQQRAHSLFLASAEFCNILSRVLSRARSRPAKLYVYINELCTVLKAHSAKKKLNLAPAATTSNEPSGNNPPTHLSLDPTNAENTASQSPRTRGSRRQIQRLEQLLALYVAEIRRLQEKELDLSELDDPDSAYLQEARLKRKLIRLFGRLCELKDCSSLTGRVIEQRIPYRGTRYPEVNRRIERLINKPGPDTFPDYGDVLRAVEKAAARHSLGLPRQQLQLMAQDAFRDVGIRLQERRHLDLIYNFGCHLTDDYRPGVDPALSDPVLARRLRENRSLAMSRLDEVISKYAMLQDKSEEGERKKRRARLQGTSSHSADTPEASLDSGEGPSGMASQGCPSASRAETDDEDDEESDEEEEEEEEEEEEEATDSEEEEDLEQMQEGQEDDEEEDEEEEAAAGKDGDKSPMSSLQISNEKNLEPGKQISRSSGEQQNKGRIVSPSLLSEEPLAPSSIDAESNGEQPEELTLEEESPVSQLFELEIEALPLDTPSSVETDISSSRKQSEEPFTTVLENGAGMVSSTSFNGGVSPHNWGDSGPPCKKSRKEKKQTGSGPLGNSYVERQRSVHEKNGKKICTLPSPPSPLASLAPVADSSTRVDSPSHGLVTSSLCIPSPARLSQTPHSQPPRPGTCKTSVATQCDPEEIIVLSDSDXLPPLLPASRMFWDNIWRKVGSR

SEQ ID NO: 219 - protein, 100 aa, Homo Sapiens
  misc_feature (88)..(88): Xaa can be any naturally occurring amino acid
MSQAEFEKAAEEVRHLKTKPSDEEMLFIYGHYKQATVGDINTERPGMLDFTGKAKWDAWNELKGTSKEDAMKAYINKVEELKKKYGIXETGFGYCAMCLS

SEQ ID NO: 220 - protein, 368 aa, Homo Sapiens
  misc_feature (360)..(360): Xaa can be any naturally occurring amino acid
MKATIILLLLAQVSWAGPFQQRGLFDFMLEDEASGIGPEVPDDRDFEPSLGPVCPFRCQCHLRVVQCSDLGLDKVPKDLPPDTTLLDLQNNKITEIKDGDFKNLKNLHALILVNNKISKVSPGAFTPLVKLERLYLSKNQLKELPEKMPKTLQELRAHENEITKVRKVTFNGLNQMIVIELGTNPLKSSGIENGAFQGMKKLSYIRIADTNITSIPQGLPPSLTELHLDGNKISRVDAASLKGLNNLAKLGLSFNSISAVDNGSLANTPHLRELHLDNNKLTRVPGGLAEHKYIQVVYLHNNNISVVGSSDFCPPGHNTKKASYSGVSLFSNPVQYWEIQPSTFRCVYVRSAIQLGNYKXFSRKPSFL

SEQ ID NO: 221 - protein, 259 aa, Homo Sapiens
  misc_feature (251)..(251): Xaa can be any naturally occurring amino acid
MKATIILLLLAQVSWAGPFQQRGLFDFMLEDEASGIGPEVPDDRDFEPSLGPVCPFRCQCHLRVVQCSDLELGTNPLKSSGIENGAFQGMKKLSYIRIADTNITSIPQGLPPSLTELHLDGNKISRVDAASLKGLNNLAKLGLSFNSISAVDNGSLANTPHLRELHLDNNKLTRVPGGLAEHKYIQVVYLHNNNISVVGSSDFCPPGHNTKKASYSGVSLFSNPVQYWEIQPSTFRCVYVRSAIQLGNYKXFSRKPSFL

SEQ ID NO: 222 - protein, 221 aa, Homo Sapiens
  misc_feature (213)..(213): Xaa can be any naturally occurring amino acid
MKATIILLLLAQVSWAGPFQQRGLFDFMLEDEASGIGPEVPDDRDFEPSLGPVCPFRCQCHLRVVQCSDLGLPPSLTELHLDGNKISRVDAASLKGLNNLAKLGLSFNSISAVDNGSLANTPHLRELHLDNNKLTRVPGGLAEHKYIQVVYLHNNNISVVGSSDFCPPGHNTKKASYSGVSLFSNPVQYWEIQPSTFRCVYVRSAIQLGNYKXFSRKPSFL

SEQ ID NO: 223 - protein, 181 aa, Homo Sapiens
  misc_feature (173)..(173): Xaa can be any naturally occurring amino acid
MKATIILLLLAQVSWAGPFQQRGLFDFMLEDEASGIGPEVPDDRDFEPSLGPVCPFRCQCHLRVVQCSDLGLDKVPKDLPPDTTLLDLQNNKITEIKDGDFKNLKNLHVVYLHNNNISVVGSSDFCPPGHNTKKASYSGVSLFSNPVQYWEIQPSTFRCVYVRSAIQLGNYKXFSRKPSFL

SEQ ID NO: 224 - protein, 85 aa, Homo Sapiens
  misc_feature (76)..(76): Xaa can be any naturally occurring amino acid
MKATIILLLLAQVSWAGPFQQRGLFDFMLEDEASGIGPEVPDDRDFEPSLGPVCPFRCQCHLRVVQCSDLGCLPSXQQYLCSWIK

SEQ ID NO: 225 - protein, 456 aa, Homo Sapiens
  misc_feature (428)..(428): Xaa can be any naturally occurring amino acid
MAPKKRPETQKTSEIVLRPRNKRSRSPLELEPEAKKLCAKGSGPSRRCDSDCLWVGLAGPQILPPCRSIVRTLHQHKLGRASWPSVQQGLQQSFLHTLDSYRILQKAAPFDRRATSLAWHPTHPSTVAVGSKGGDIMLWNFGIKDKPTFIKGIGAGGSITGLKFNPLNTNQFYASSMEGTTRLQDFKGNILRVFASSDTINIWFCSLDVSASSRMVVTGDNVGNVILLNMDGKELWNLRMHKKKVTHVALNPCCDWFLATASVDQTVKIWDLRQVRGKASFLYSLPHRHPVNAACFSPDGARLLTTDQKSEIRVYSASQWDCPLGLIPHPHRHFQHLTPIKAAWHPRYNLIVVGRYPDPNFKSCTPYELRTIDVFDGNSGKMMCQLYDPESSGISSLNEFNPMGDTLASAMGYHILIWSQEEARTRKXETLKKVWARQGLGAHTWDQVLQAEVVIC

SEQ ID NO: 226 - protein, 236 aa, Homo Sapiens
  misc_feature (170)..(170): Xaa can be any naturally occurring amino acid
MAAESLPFSFGTLSSWELEAWYEDLQEVLSSDENGGTYVSPPGNEEEESKIFTTLDPASLAWLTEEEPEPAEVTSTSQSPHSPDSSQSSLAQEEEEEDQGRTRKRKQSGHSPARAGKQRMKEKEQENERKVAQLAEENERLKQEIERLTREVEATRRALIDRMVNLHQAXTIGSISPPLGPHYPPFPEVATDYPLTSANDVTLNPTYAGGRLGVDKRKGLSLYIEIVHLFITVPIY

SEQ ID NO: 227 - protein, 129 aa, Homo Sapiens
  misc_feature (95)..(95): Xaa can be any naturally occurring amino acid
MRTLAILAAILLVALQAQAEPLQARADEVAAAPEQIAADIPEVVVSLAWDESLAPKHPGSRKNMACYCRIPACIAGERRYGTCIYQGRLWAFCCXACRKRKMSSKFALRATGNCYYSCTFCSISFPHPK

SEQ ID NO: 228 - protein, 382 aa, Homo Sapiens
  misc_feature (376)..(376): Xaa can be any naturally occurring amino acid
MSASAPAAEGEGTPTQPASEKEPEMPGPREESEEEEDEDDEEEEEEEKEKSLIVEGKREKKKVERLTMQVSSLQREPFTIAQGKGQKLCEIERIHFFLSKKKTDELRNLHKLLYNRPGTVSSLKKNVGQFSGFPFEKGSVQYKKKEEMLKKFRNAMLKSICEVLDLERSGVNSELVKRILNFLMHPKPSGKPLPKSKKTCSKGSKKERNSSGMARKAKRTKCPEILSDESSSDEDEKKNKEESSDDEDKESEEEPPKKTAKREKPKQKATSKSKKSVKSANVKKADSSTTKKNQNSSKKESESEDSSDDEPLIKKLKKPPTDEELKETIKKLLASANLEEVTMKQICKKVYENYPTYDLTERKDFIKTTVKELISXDRGQRR

SEQ ID NO: 229 - protein, 193 aa, Homo Sapiens
  misc_feature (188)..(188): Xaa can be any naturally occurring amino acid
MVGSLNCIVAVSQNMGIGKNGDLPWPPLRNEFRYFQRMTTTSSVEGKQNLVIMGKKTWFSIPEKNRPLKGRINLVLSRELKEPPQGAHFLSRSLDDALKLTEQPELANKVDMVWIVGGSSVYKEAMNHPGHLKLFVTRIMQDFESDTFFPEIDLEKYKLLPEYPGVLSDVQEEKGIKYKFEVYEKNDXYEGVF

SEQ ID NO: 230 - protein, 1203 aa, Homo Sapiens
  misc_feature (1194)..(1194): Xaa can be any naturally occurring amino acid
MERHQPRLHHPAQGSAAGTPYPSSASLRGCRESKMPRRKGPQHPPPPSGPEEPGEKRPKFHLNIRTLTDDMLDKFASIRIPGSKKERPPLPNLKTAFASSDCSAAPLEMMENFPKPLSENELLELFEKMMEDMNLNEDKKAPLREKDFSIKKEMVMQYINTASKTGSLKRSRQISPQEFIHELKMGSADERLVTCLESLRVSLTSNPVSWVESFGHEGLGLLLDILEKLISGKIQEKVVKKNQHKVIQCLKALMNTQYGLERIMSEERSLSLLAKAVDPRHPNMMTDVVKLLSAVCIVGEESILEEVLEALTSAGEEKKIDRFFCIVEGLRHNSVQLQVACMQLINALVTSPDDLDFRLHIRNEFMRCGLKEILPNLKCIKNDGLDIQLKVFDEHKEEDLFELSHRLEDIRAELDEAYDVYNMVWSTVKETRAEGYFISILQHLLLIRNDYFIRQQYFKLIDECVSQIVLHRDGMDPDFTYRKRLDLDLTQFVDICIDQAKLEEFEEKASELYKKFEKEFTDHQETQAELQKKEAKINELQAELQAFKSQFGALPADCNIPLPPSKEGGTGHSALPPPPPLPSGGGVPPPPPPPPPPPLPGMRMPFSGPVPPPPPLGFLGGQNSPPLPILPFGLKPKKEFKPEISMRRLNWLKIRPHEMTENCFWIKVNENKYENVDLLCKLENTFCCQQKERREEEDIEEKKSIKKKIKELKFLDSKIAQNLSIFLSSFRVPYEEIRMMILEVDETRLAESMIQNLIKHLPDQEQLNSLSQFKSEYSNLCEPEQFVVVMSNVKRLRPRLSAILFKLQFEEQVNNIKPDIMAVSTACEEIKKSKSFSKLLELVLLMGNYMNAGSRNAQTFGFNLSSLCKLKDTKSADQKTTLLHFLVEICEEKYPDILNFVDDLEPLDKASKVSVETLEKNLRQMGRQLQQLEKELETFPPPEDLHDKFVTKMSRFVISAKEQYETLSKLHENMEKLYQSIIGYYAIDVKKVSVEDFLTDLNNFRTTFMQAIKENIKKREAEEKEKRVRIAKELAERERLERQQKKKRLLEMKTEGDETGVMDNLLEALQSGAAFRDRRKRTPMPKDVRQSLSPMSQRPVLKVCNHENQKVQLTEGSRSHYNINCNSTRTPVAKELNYNLDTHTSTGRIKAAEKKEACNVESNRKKETELLGSFSKNESVPEVEALLARLRALXVKLVFKKND

SEQ ID NO: 231 - protein, 1107 aa, Homo Sapiens
  misc_feature (1092)..(1092): Xaa can be any naturally occurring amino acid
MCRKKPDTMILTQIEAKEACDWLRATGFPQYAQLYEDFLFPIDISLVKREHDFLDRDAIEALCRRLNTLNKCAVMKLEISPHRKRSDDSDEDEPCAISGKWTFQRDSKRWSRLEEFDVFSPKQDLVPGSPDDSHPKDGPSPGGTLMDLSERQEVSSVRSLSSTGSLPSHAPPSEDAATPRTNSVISVCSSSNLAGNDDSFGSLPSPKELSSFSFSMKGHEKTAKSKTRSLLKRMESLKLKSSHHSKHKAPSKLGLIISGPILQEGMDEEKLKQLNCVEISALNGNRINVPMVRKRSVSNSTQTSSSSSQSETSSAVSTPSPVTRTRSLSACNKRVGMYLEGFDPFNQSTFNNVVEQNFKNRESYPEDTVFYIPEDHKPGTFPKALTNGSFSPSGNNGSVNWRTGSFHGPGHISLRRENSSDSPKELKRRNSSSSMSSRLSIYDNVPGSILYSSSGDLADLENEDIFPELDDILYHVKGMQRIVNQWSEKFSDEGDSDSALDSVSPCPSSPKQIHLDVDNDRTTPSDLDSTGNSLNEPEEPSEIPERRDSGVGASLTRSNRHRLRWHSFQSSHRPSLNSVSLQINCQSVAQMNLLQKYSLLKLTALLEKYTPSNKHGFSWAVPKFMKRIKVPDYKDRSVFGVPLTVNVQRTGQPLPQSIQQAMRYLRNHCLDQVGLFRKSGVKSRIQALRQMNEGAIDCVNYEGQSAYDVADMLKQYFRDLPEPLMTNKLSETFLQIYQYVPKDQRLQAIKAAIMLLPDENREVLQTLLYFLSDVTAAVKENQMTPTNLAVCLAPSLFHLNTLKRENSSPRVMQRKQSLGKPDQKDLNENLAATQGLAHMIAECKKLFQVPEEMSRCRNSYTEQELKPLTLEALGHLGNDDSADYQHFLQDCVDGLFKEVKEKFKGWVSYSTSEQAELSYKKVSEGPPLRLWRSVIEVPAVPEEILKRLLKEQHLWDVDLLDSKVIEILDSQTEIYQYVQNSMAPHPARDYVVLRTWRTNLPKGACALLLTSVDHDRAPVVGVRVNVLLSRYLIEPCGPGKSKLTYMCRVDLRGHMPEWYTKSFGHLCAAEVVKIRDSFSNQNTETKDTKSRXSLKQRNRFHHHGVCF

SEQ ID NO: 232 - protein, 2655 aa, Homo Sapiens
  misc_feature (2650)..(2650): Xaa can be any naturally occurring amino acid
MHSSSYSYRSSDSVFSNTTSTRTSLDSNENLLLVHCGPTLINSCISFGSESFDGHRLEMLQQIANRVQRDSVICEDKLILAGNALQSDSKRLESGVQFQNEAEIAGYILECENLLRQHVIDVQILIDGKYYQADQLVQRVAKLRDEIMALRNECSSVYSKGRILTTEQTKLMISGITQSLNSGFAQTLHPSLTSGLTQSLTPSLTSSSMTSGLSSGMTSRLTPSVTPAYTPGFPSGLVPNFSSGVEPNSLQTLKLMQIRKPLLKSSLLDQNLTEEEINMKFVQDLLNWVDEMQVQLDRTEWGSDLPSVESHLENHKNVHRAIEEFESSLKEAKISEIQMTAPLKLTYAEKLHRLESQYAKLLNTSRNQERHLDTLHNFVSRATNELIWLNEKEEEEVAYDWSERNTNIARKKDYHAELMRELDQKEENIKSVQEIAEQLLLENHPARLTIEAYRAAMQTQWSWILQLCQCVEQHIKENTAYFEFFNDAKEATDYLRNLKDAIQRKYSCDRSSSIHKLEDLVQESMEEKEELLQYKSTIANLMGKAKTIIQLKPRNSDCPLKTSIPIKAICDYRQIEITIYKDDECVLANNSHRAKWKVISPTGNEAMVPSVCFTVPPPNKEAVDLANRIEQQYQNVLTLWHESHINMKSVVSWHYLINEIDRIRASNVASIKTMLPGEHQQVLSNLQSRFEDFLEDSQESQVFSGSDITQLEKEVNVCKQYYQELLKSAEREEQEESVYNLYISEVRNIRLRLENCEDRLIRQIRTPLERDDLHESVFRITEQEKLKKELERLKDDLGTITNKCEEFFSQAAASSSVPTLRSELNVVLQNMNQVYSMSSTYIDKLKTVNLVLKNTQAAEALVKLYETKLCEEEAVIADKNNIENLISTLKQWRSEVDEKRQVFHALEDELQKAKAISDEMFKTYKERDLDFDWHKEKADQLVERWQNVHVQIDNRLRDLEGIGKSLKYYRDTYHPLDDWIQQVETTQRKIQENQPENSKTLATQLNQQKMLVSEIEMKQSKMDECQKYAEQYSATVKDYELQTMTYRAMVDSQQKSPVKRRRMQSSADLIIQEFMDLRTRYTALVTLMTQYIKFAGDSLKRLEEEEIKRCKETSEHGAYSDLLQRQKATVLENSKLTGKISELERMVAELKKQKSRVEEELPKVREAAENELRKQQRNVEDISLQKIRAESEAKQYRRELETIVREKEAAERELERVRQLTIEAEAKRAAVEENLLNFRNQLEENTFTRRTLEDHLKRKDLSLNDLEQQKNKLMEELRRKRDNEEELLKLIKQMEKDLAFQKQVAEKQLKEKQKIELEARRKITEIQYTCRENALPVCPITQATSCRAVTGLQQEHDKQKAEELKQQVDELTAANRKAEQDMRELTYELNALQLEKTSSEEKARLLKDKLDETNNTLRCLKLELERKDQAEKGYSQQLRELGRQLNQTTGKAEEAMQEASDLKKIKRNYQLELESLNHEKGKLQREVDRITRAHAVAEKNIQHLNSQIHSFRDEKELERLQICQRKSDHLKEQFEKSHEQLLQNIKAEKENNDKIQRLNEELEKSNECAEMLKQKVEELTRQNNETKLMMQRIQAESENIVLEKQTIQQRCEALKIQADGFKDQLRSTNEHLHKQTKTEQDFQRKIKCLEEDLAKSQNLVSEFKQKCDQQNIIIQNTKKEVRNLNAELNASKEEKRRGEQKVQLQQAQVQELNNRLKKVQDELHLKTIEEQMTHRKMVLFQEESGKFKQSAEEFRKKMEKLMESKVITENDISGIRLDFVSLQQENSRAQENAKLCETNIKELERQLQQYREQMQQGQHMEANHYQKCQKLEDELIAQKREVENLKQKMDQQIKEHEHQLVLLQCEIQKKSTAKDCTFKPDFEMTVKECQHSGELSSRNTGHLHPTPRSPLLRWTQEPQPLEEKWQHRVVEQIPKEVQFQPPGAPLEKEKSQQCYSEYFSQTSTELQITFDETNPITRLSEIEKIRDQALNNSRPPVRYQDNACEMELVKVLTPLEIAKNKQYDMHTEVTTLKQEKNPVPSAEEWMLEGCRASGGLKKGDFLKKGLEPETFQNFDGDHACSVRDDEFKFQGLRHTVTARQLVEAKLLDMRTIEQLRLGLKTVEEVQKTLNKFLTKATSIAGLYLESTKEKISFASAAERIIIDKMVALAFLEAQAATGFIIDPISGQTYSVEDAVLKGVVDPEFRIRLLEAEKAAVGYSYSSKTLSVFQAMENRMLDRQKGKHILEAQIASGGVIDPVRGIRVPPEIALQQGLLNNAILQFLHEPSSNTRVFPNPNNKQALYYSELLRMCVFDVESQCFLFPFGERNISNLNVKKTHRISVVDTKTGSELTVYEAFQRNLIEKSIYLELSGQQYQWKEAMFFESYGHSSHMLTDTKTGLHFNINEAIEQGTIDKALVKKYQEGLITLTELADSLLSRLVPKKDLHSPVAGYWLTASGERISVLKASRRNLVDRITALRCLEAQVSTGGIIDPLTGKKYRVAEALHRGLVDEGFAQQLRQCELVITGIGHPITNKMMSVVEAVNANIINKEMGIRCLEFQYLTGGLIEPQVHSRLSIEEALQVGIIDVLIATKLKDQKSYVRNIICPQTKRKLTYKEALEKADFDFHTGLKLLEVSEPLMTGISSLYYSSXWDMFK

SEQ ID NO: 233 - protein, 385 aa, Homo Sapiens
  misc_feature (368)..(368): Xaa can be any naturally occurring amino acid
MVMEVGTLDAGGLRALLGERAAQCLLLDCRSFFAFNAGHIAGSVNVRFSTIVRRRAKGAMGLEHIVPNAELRGRLLAGAYHAVVLLDERSAALDGAKRDGTLALAAGALCREARAAQVFFLKGGYEAFSASCPELCSKQSTPMGLSLPLSTSVPDSAESGCSSCSTPLYDQGGPVEILPFLYLGSAYHASRKDMLDALGITALINVSANCPNHFEGHYQYKSIPVEDNHKADISSWFNEAIDFIDSIKNAGGRVFVHCQAGISRSATICLAYLMRTNRVKLDEAFEFVKQRRSIISPNFSFMGQLLQFESQVLAPHCSAEAGSPAMAVLDRGTSTTTVFNFPVSIPVHSTNSALSYLQSPITTSPSCXKATGGEALHIPLGLHAP

SEQ ID NO: 234 - protein, 410 aa, Homo Sapiens
  misc_feature (395)..(395): Xaa can be any naturally occurring amino acid
MVTMEELREMDCSVLKRLMNRDENGGGAGGSGSHGTLGLPSGGKCLLLDCRPFLAHSAGYILGSVNVRCNTIVRRRAKGSVSLEQILPAEEEVRARLRSGLYSAVIVYDERSPRAESLREDSTVSLVVQALRRNAERTDICLLKGGYERFSSEYPEFCSKTKALAAIPPPVPPSATEPLDLGCSSCGTPLHDQGGPVEILPFLYLGSAYHAARRDMLDALGITALLNVSSDCPNHFEGHYQYKCIPVEDNHKADISSWFMEAIEYIDAVKDCRGRVLVHCQAGISRSATICLAYLMMKKRVRLEEAFEFVKQRRSIISPNFSFMGQLLQFESQVLATSCAAEAASPSGPLRERGKTPATPTSQFVFSFPVSVGVHSAPSSLPYLHSPITTSPSCXSRPGGPRTRAGSQQG

SEQ ID NO: 235 - protein, 825 aa, Homo Sapiens
  misc_feature (717)..(717): Xaa can be any naturally occurring amino acid
MGETKIIYHLDGQETPYLVKLPLPAERVTLADFKGVLQRPSYKFFFKSMDDDFGVVKEEISDDNAKLPCFNGRVVSWLVSAEGSHPDPAPFCADNPSELPPPMERTGGIGDSRPPSFHPHAGGGSQENLDNDTETDSLVSAQRERPRRRDGPEHATRLNGTAKGERRREPGGYDSSSTLMSSELETTSFFDSDEDDSTSRFSSSTEQSSASRLMRRHKRRRRKQKVSRIERSSSFSSITDSTMSLNIITVTLNMEKYNFLGISIVGQSNERGDGGIYIGSIMKGGAVAADGRIEPGDMLLQVNEINFENMSNDDAVRVLREIVHKPGPITLTVAKCWDPSPRGCFTLPRSEPIRPIDPAAWVSHTAAMTGTFPAYGMSPSLSTITSTSSSITSSIPDTERLDDFHLSIHSDMAAIVKAMASPESGLEVRDRMWLKITIPNAFIGSDVVDWLYHNVEGFTDRREARKYASNLLKAGFIRHTVNKITFSEQCYYIFGDLCGNMANLSLHDHDGSSGASDQDTLAPLPHPGAAPWPMAFPYQYPPPPHPYNPHPGFPELGYSYGGGSASSQHSEGSRSSGSNRSGSDRRKEKDPKAGDSKSGGSGSESDHTTRSSLRGPRERAPSERSGPAASEHSHRSHHSLASSLRSHHTHPSYGPPGVPPLYGPPMLMMPPPPAAMGPPGAPPGRDLASVPPELTASRQSFRMAMGNPSEFFVDVMXAGPLPQLHSAPTPAGCVPLSIRPSFLLCLVPEREIKGTKSRCANCSQGAARVGCTYRLALQPPNLPLAPVRFLCPLIPAQDFPGPLLSLGPDLLVLPLTPLCNPHFGS

SEQ ID NO: 236 - protein, 128 aa, Homo Sapiens
  misc_feature (90)..(90): Xaa can be any naturally occurring amino acid
MCDRKAVIKNADMSEEMQQDSVECATQALEKYNIEKDIAAHIKKEFDKKYNPTWHCIVGRNFGSYVTHETKHFIYFYLGQVAILLFKSGXKHGLCHTPSDPSKNKDCSLNSKYQRLKFSALLREHLDV

SEQ ID NO: 237 - protein, 606 aa, Homo Sapiens
  misc_feature (602)..(602): Xaa can be any naturally occurring amino acid
MLTRKPSAAAPAAYPTGRGGDSAVRQLQASPGLGAGATRSGVGTGPPSPIALPPLRASNAAAAAHTIGGSKHTMNDHLHVGSHAHGQIQVQQLFEDNSNKRTVLTTQPNGLTTVGKTGLPVVPERQLDSIHRRQGSSTSLKSMEGMGKVKATPMTPEQAMKQYMQKLTAFEHHEIFSYPEIYFLGLNAKKRQGMTGGPNNGGYDDDQGSYVQVPHDHVAYRYEVLKVIGKGSFGQVVKAYDHKVHQHVALKMVRNEKRFHRQAAEEIRILEHLRKQDKDNTMNVIHMLENFTFRNHICMTFELLSMNLYELIKKNKFQGFSLPLVRKFAHSILQCLDALHKNRIIHCDLKPENILLKQQGRSGIKVIDFGSSCYEHQRVYTYIQSRFYRAPEVILGARYGMPIDMWSLGCILAELLTGYPLLPGEDEGDQLACMIELLGMPSQKLLDASKRAKNFVSSKGYPRYCTVTTLSDGSVVLNGGRSRRGKLRGPPESREWGNALKGCDDPLFLDFLKQCLEWDPAVRMTPGQALRHPWLRRRLPKPPTGEKTSVKRITESTGAITSISKLPPPSSSASKLRTNLAQMTDANGNIQQRTVLPKLVSXAHVP

SEQ ID NO: 238 - protein, 448 aa, Homo Sapiens
  misc_feature (438)..(438): Xaa can be any naturally occurring amino acid
MALAGAPAGGPCAPALEALLGAGALRLLDSSQIVIISAAQDASAPPAPTGPAAPAAGPCDPDLLLFATPQAPRPTPSAPRPALGRPPVKRRLDLETDHQYLAESSGPARGRGRHPGKGVKSPGEKSRYETSLNLTTKRFLELLSHSADGVVDLNWAAEVLKVQKRRIYDITNVLEGIQLIAKKSKNHIQWLGSHTTVGVGGRLEGLTQDLRQLQESEQQLDHLMNICTTQLRLLSEDTDSQRLAYVTCQDLRSIADPAEQMVMVIKAPPETQLQAVDSSENFQISLKSKQGPIDVFLCPEETVGGISPGKTPSQEVTSEEENRATDSATIVSPPPSSPPSSLTTDPSQSLLSLEQEPLLSRMGSLRAPVDEDRLSPLVAADSLLEHVREDFSGLLPEEFISLSPPHEALDYHFGLEEGEGIRDLFDCDFGDLTPLDFXQGLEGPGFPE

SEQ ID NO: 239 - protein, 470 aa, Homo Sapiens
  misc_feature (466)..(466): Xaa can be any naturally occurring amino acid
MRKGIQPALEQYLVTAGGGEGAAVVAAAAAASMDKRALLASPGFAAAAAAAAAPGAYIQILTTNTSTTSCSSSLQSGAVAAGPLLPSAPGAEQTAGSLLYTTPHGPSSRAGLLQQPPALGRGGSGGGGGPPAKRRLELGESGHQYLSDGLKTPKGKGRAALRSPDSPKTPKSPSEKTRYDTSLGLLTKKFIQLLSQSPDGVLDLNKAAEVLKVQKRRIYDITNVLEGIHLIKKKSKNNVQWMGCSLSEDGGMLAQCQGLSKEVTELSQEEKKLDELIQSCTLDLKLLTEDSENQRLAYVTYQDIRKISGLKDQTVIVVKAPPETRLEVPDSIESLQIHLASTQGPIEVYLCPEETETHSPMKTNNQDHNGNIPKPASKDLASTNSGHSDCSVSMGNLSPLASPANLLQQTEDQIPSNLEGPFVNLLPPLLQEDYLLSLGEEEGISDLFDAYDLEKLPLVEDFMCSXLCFV

SEQ ID NO: 240 - protein, 357 aa, Homo Sapiens
  misc_feature (346)..(346): Xaa can be any naturally occurring amino acid
MAAAEPASSGQQAPAGQGQGQRPPPQPPQAQAPQPPPPPQLGGAGGGSSRHEKSLGLLTTKFVSLLQEAKDGVLDLKAAADTLAVRQKRRIYDITNVLEGIDLIEKKSKNSIQWKGVGAGCNTKEVIDRLRYLKAEIEDLELKERELDQQKLWLQQSIKNVMDDSINNRFSYVTHEDICNCFNGDTLLAIQAPSGTQLEVPIPEMGQNGQKKYQINLKSHSGPIHVLLINKESSSSKPVVFPVPPPDDLTQPSSQSLTPVTPQKSSMATQNLPEQHVSERSQALQQTSATDISSGSISGDIIDELMSSDVFPLLRLSPTPADDYNFNLDDNEGVCDLFDVQILNYXIPWKLGTVIYL

SEQ ID NO: 241 - protein, 358 aa, Homo Sapiens
  misc_feature (347)..(347): Xaa can be any naturally occurring amino acid
MAAAEPASSGQQAPAGQGQGQRPPPQPPQAQAPQPPPPPQLGGAGGGSSRHEKSLGLLTTKFVSLLQEAKDGVLDLKAAADTLAVRQKRRIYDITNVLEGIDLIEKKSKNSIQWKGVGAGCNTKEVIDRLRYLKAEIEDLELKERELDQQKLWLQQSIKNVMDDSINNRFSYVTHEDICNCFNGDTLLAIQAPSGTQLEVPIPEMGQNGQKKYQINLKSHSGPIHVLLINKESSSSKPVVFPVPPPDDLTQPSSQSLTPVTPQKSSMATQNLPEQHVSERSQALQQTSATDISSAGSISGDIIDELMSSDVFPLLRLSPTPADDYNFNLDDNEGVCDLFDVQILNYXIPWKLGTVIYL

SEQ ID NO: 242 - protein, 238 aa, Homo Sapiens
  misc_feature (214)..(214): Xaa can be any naturally occurring amino acid
MAITQFRLFKFCTCLATVFSFLKRLICRSGRGRKLSGDQITLPTTVDYSSVPKQTDVEEWTSWDEDAPTSVKIEGGNGNVATQQNSLEQLEPDYFKDMTPTIRKTQKIVIKKREPLNFGIPDGSTGFSSRLAATQDLPFIHQSSELGDLDTWQENTNAWEEEEDAAWQAEEVLRQQKLADREKRAAEQQRKKMEKEAQRLMKKEQNKIGVKLSXHMFKFYHASRRNLSSTTQATFVWI

SEQ ID NO: 243 - protein, 896 aa, Homo Sapiens
  misc_feature (859)..(859): Xaa can be any naturally occurring amino acid
MVNFTVDQIRAIMDKKANIRNMSVIAHVDHGKSTLTDSLVCKAGIIASARAGETRFTDTRKDEQERCITIKSTAISLFYELSENDLNFIKQSKDGAGFLINLIDSPGHVDFSSEVTAALRVTDGALVVVDCVSGVCVQTETVLRQAIAERIKPVLMMNKMDRALLELQLEPEELYQTFQRIVENVNVIISTYGEGESGPMGNIMIDPVLGTVGFGSGLHGWAFTLKQFAEMYVAKFAAKGEGQLGPAERAKKVEDMMKKLWGDRYFDPANGKFSKSATSPEGKKLPRTFCQLILDPIFKVFDAIMNFKKEETAKLIEKLDIKLDSEDKDKEGKPLLKAVMRRWLPAGDALLQMITIHLPSPVTAQKYRCELLYEGPPDDEAAMGIKSCDPKGPLMMYISKMVPTSDKGRFYAFGRVFSGLVSTGLKVRIMGPNYTPGKKEDLYLKPIQRTILMMGRYVEPIEDVPCGNIVGLVGVDQFLVKTGTITTFEHAHNMRVMKFSVSPVVRVAVEAKNPADLPKLVEGLKRLAKSDPMVQCIIEESGEHIIAGAGELHLEICLKDLEEDHACIPIKKSDPVVSYRETVSEESNVLCLSKSPNKHNRLYMKARPFPDGLAEDIDKGEVSARQELKQRARYLAEKYEWDVAEARKIWCFGPDGTGPNILTDITKGVQYLNEIKDSVVAGFQWATKEGALCEENMRGVRFDVHDVTLHADAIHRGGGQIIPTARRCLYASVLTAQPRLMEPIYLVEIQCPEQVVGGIYGVLNRKRGHVFEESQVAGTPMFVVKAYLPVNESFGFTADLRSNTGGQAFPQCVFDHWQILPGDPFDNSSRPSQVVAETRKRKGLKEGIPALDNFLDKLXAALPAAPAAPGTRSTHSTTSSNSQTTPGDCPDTATLP

SEQ ID NO: 244 - protein, 246 aa, Homo Sapiens
  misc_feature (206)..(206): Xaa can be any naturally occurring amino acid
MEFLWAPLLGLCCSLAAADRHTVFWNSSNPKFRNEDYTIHVQLNDYVDIICPHYEDHSVADAAMEQYILYLVEHEEYQLCQPQSKDQVRWQCNRPSAKHGPEKLSEKFQRFTPFTLGKEFKEGHSYYYISKPIHQHEDRCLRLKVTVSGKITHSPQAHDNPQEKRLAADDPEVRVLHSIGHSAAPRLFPLAWTVLLLPLLLLQTPXRCMPHLALKRDRLKRGTGTPNLSWGHFQSPQPWEPLPPQA

SEQ ID NO: 245 - protein, 250 aa, Homo Sapiens
  misc_feature (229)..(229): Xaa can be any naturally occurring amino acid
MLHVEMLTLVFLVLWMCVFSQDPGSKAVADRYAVYWNSSNPRFQRGDYHIDVCINDYLDVFCPHYEDSVPEDKTERYVLYMVNFDGYSACDHTSKGFKRWECNRPHSPNGPLKFSEKFQLFTPFSLGFEFRPGREYFYISSAIPDNGRRSCLKLKVFVRPTNSCMKTIGVHDRVFDVNDKVENSLEPADDTVHESAEPSRGENAAQTPRIPSRLLAILLFLLAMLLTLXHSLLPSLVTENIRVLEHQRST

SEQ ID NO: 246 - protein, 382 aa, Homo Sapiens
  misc_feature (347)..(347): Xaa can be any naturally occurring amino acid
MARPGQRWLGKWLVAMVVWALCRLATPLAKNLEPVSWSSLNPKFLSGKGLVIYPKIGDKLDIICPRAEAGRPYEYYKLYLVRPEQAAACSTVLDPNVLVTCNRPEQEIRFTIKFQEFSPNYMGLEFKKHHDYYITSTSNGSLEGLENREGGVCRTRTMKIIMKVGQDPNAVTPEQLTTSRPSKEADNTVKMATQAPGSRGSLGDSDGKHETVNQEEKSGPGASGGSSGDPDGFFNSKVALFAAVGAGCVIFLLIIIFLTVLLLKLRKRHRKHTQQRAAALSLSTLASPKGGSGTAGTEPSDIIIPLRTTENNYCPHYEKVSGDYGHPVYIVQEMPPQSPANIYYKVXVPGTASGPRGTVGLDRTSPFAPTPPPLASCAHLCI

SEQ ID NO: 247 - protein, 354 aa, Homo Sapiens
  misc_feature (334)..(334): Xaa can be any naturally occurring amino acid
MAVRRDSVWKYCWGVLMVLCRTAISKSIVLEPIYWNSSNSKFLPGQGLVLYPQIGDKLDIICPKVDSKTVGQYEYYKVYMVDKDQADRCTIKKENTPLLNCAKPDQDIKFTIKFQEFSPNLWGLEFQKNKDYYIISTSNGSLEGLDNQEGGVCQTRAMKILMKVGQDASSAGSTRNKDPTRRPELEAGTNGRSSTTSPFVKPNPGSSTDGNSAGHSGNNILGSEVALFAGIASGCIIFIVIIITLVVLLLKYRRRHRKHSPQHTTTLSLSTLATPKRSGNNNGSEPSDIIIPLRTADSVFCPHYEKVSGDYGHPVYIVQEMPPQSPANIYYKVXEGPWWYLCFPRGHLMSRCLP

SEQ ID NO: 248 - protein, 360 aa, Homo Sapiens
  misc_feature (341)..(341): Xaa can be any naturally occurring amino acid
MGPPHSGPGGVRVGALLLLGVLGLVSGLSLEPVYWNSANKRFQAEGGYVLYPQIGDRLDLLCPRARPPGPHSSPNYEFYKLYLVGGAQGRRCEAPPAPNLLLTCDRPDLDLRFTIKFQEYSPNLWGHEFRSHHDYYIIATSDGTREGLESLQGGVCLTRGMKVLLRVGQSPRGGAVPRKPVSEMPMERDRGAAHSLEPGKENLPGDPTSNATSRGAEGPLPPPSMPAVAGAAGGLALLLLGVAGAGGAMCWRRRRAKPSESRHPGPGSFGRGGSLGLGGGGGMGPREAEPGELGIALRGGGAADPPFCPHYEKVSGDYGHPVYIVQDGPPQSPPNIYYKVXGLLSRGYPESSPSWGAPPV

SEQ ID NO: 249 - protein, 1231 aa, Homo Sapiens
  misc_feature (1208)..(1208): Xaa can be any naturally occurring amino acid
MLLTLIILLPVVSKFSFVSLSAPQHWSCPEGTLAGNGNSTCVGPAPFLIFSHGNSIFRIDTEGTNYEQLVVDAGVSVIMDFHYNEKRIYWVDLERQLLQRVFLNGSRQERVCNIEKNVSGMAINWINEEVIWSNQQEGIITVTDMKGNNSHILLSALKYPANVAVDPVERFIFWSSEVAGSLYRADLDGVGVKALLETSEKITAVSLDVLDKRLFWIQYNREGSNSLICSCDYDGGSVHISKHPTQHNLFAMSLFGDRIFYSTWKMKTIWIANKHTGKDMVRINLHSSFVPLGELKVVHPLAQPKAEDDTWEPEQKLCKLRKGNCSSTVCGQDLQSHLCMCAEGYALSRDRKYCEDVNECAFWNHGCTLGCKNTPGSYYCTCPVGFVLLPDGKRCHQLVSCPRNVSECSHDCVLTSEGPLCFCPEGSVLERDGKTCSGCSSPDNGGCSQLCVPLSPVSWECDCFPGYDLQLDEKSCAASGPQPFLLFANSQDIRHMHFDGTDYGTLLSQQMGMVYALDHDPVENKIYFAHTALKWIERANMDGSQRERLIEEGVDVPEGLAVDWIGRRFYWTDRGKSLIGRSDLNGKRSKIITKENISQPRGIAVHPMAKRLFWTDTGINPRIESSSLQGLGRLVIASSDLIWPSGITIDFLTDKLYWCDAKQSVIEMANLDGSKRRRLTQNDVGHPFAVAVFEDYVWFSDWAMPSVIRVNKRTGKDRVRLQGSMLKPSSLVVVHPLAKPGADPCLYQNGGCEHICKKRLGTAWCSCREGFMKASDGKTCLALDGHQLLAGGEVDLKNQVTPLDILSKTRVSEDNITESQHMLVAEIMVSDQDDCAPVGCSMYARCISEGEDATCQCLKGFAGDGKLCSDIDECEMGVPVCPPASSKCINTEGGYVCRCSEGYQGDGIHCLDIDECQLGVHSCGENASCTNTEGGYTCMCAGRLSEPGLICPDSTPPPHLREDDHHYSVRNSDSECPLSHDGYCLHDGVCMYIEALDKYACNCVVGYIGERCQYRDLKWWELRHAGHGQQQKVIVVAVCVVVLVMLLLLSLWGAHYYRTQKLLSKNPKNPYEESSRDVRSRRPADTEDGMSSCPQPWFVVIKEHQDLKNGGQPVAGEDGQAADGSMQPTSWRQEPQLCGMGTEQGCWIPVSSDKGSCPQVMERSFHMPSYGTQTLEGGVEKPHSLLSANPLWQQRALDPPHQMELTQXKLELKGKSRRMNYVDAQYLFFQK

SEQ ID NO: 250 - protein, 366 aa, Homo Sapiens
  misc_feature (353)..(353): Xaa can be any naturally occurring amino acid
MASRKEGTGSTATSSSSTAGAAGKGKGKGGSGDSAVKQVQIDGLVVLKIIKHYQEEGQGTEVVQGVLLGLVVEDRLEITNCFPFPQHTEDDADFDEVQYQMEMMRSLRHVNIDHLHVGWYQSTYYGSFVTRALLDSQFSYQHAIEESVVLIYDPIKTAQGSLSLKAYRLTPKLMEVCKEKDFSPEALKKANITFEYMFEEVPIVIKNSHLINVLMWELEKKSAVADKHELLSLASSNHLGKNLQLLMDRVDEMSQDIVKYNTYMRNTSKQQQQKHQYQQRRQQENMQRQSRGEPPLPEEDLSKLFKPPQPPARMDSLLIAGQINTYCQNIKEFTAQNLGKLFMAQALQEYNNXEKEVSRKEVNMNS

SEQ ID NO: 251 - protein, 222 aa, Homo Sapiens
  misc_feature (218)..(218): Xaa can be any naturally occurring amino acid
MATVEPETTPTPNPPTTEEEKTESNQEVANPEHYIKHPLQNRWALWFFKNDKSKTWQANLRLISKFDTVEDFWALYNHIQLSSNLMPGCDYSLFKDGIEPMWEDEKNKRGGRWLITLNKQQRRSDLDRFWLETLLCLIGESFDDYSDDVCGAVVNVRAKGDKIAIWTTECENREAVTHIGRVYKERLGLPPKIVIGYQSHADTATKSGSTTKNRFVVXEDTF

SEQ ID NO: 252 - protein, 145 aa, Homo Sapiens
  misc_feature (119)..(119): Xaa can be any naturally occurring amino acid
MSGGSSCSQTPSRAIPATRRVVLGDGVQLPPGDYSTTPGGTLFSTTPGGTRIIYDRKFLMECRNSPVTKTPPRDLPTIPGVTSPSSDEPPMEASQSHLRNSPEDKRAGGEESQFEMDIXSTSHRVEHYQGAPQGLPGRSPTSQAL

SEQ ID NO: 253 - protein, 293 aa, Homo Sapiens
  misc_feature (249)..(249): Xaa can be any naturally occurring amino acid
MADFDTYDDRAYSSFGGGRGSRGSAGGHGSRSQKELPTEPPYTAYVGNLPFNTVQGDIDAIFKDLSIRSVRLVRDKDTDKFKGFCYVEFDEVDSLKEALTYDGALLGDRSLRVDIAEGRKQDKGGFGFRKGGPDDRGMGSSRESRGGWDSRDDFNSGFRDDFLGGRGGSRPGDRRTGPPMGSRFRDGPPLRGSNMDFREPTEEERAQRPRLQLKPRTVATPLNQVANPNSAIFGGARPREEVVQKEQEXACGWEGMGRGGLEQDHSLVSPRAAVLQPPLLRLPLASSQRKHSL

SEQ ID NO: 254 - protein, 168 aa, Homo Sapiens
  misc_feature (155)..(155): Xaa can be any naturally occurring amino acid
MADDLDFETGDAGASATFPMQCSALRKNGFVVLKGRPCKIVEMSTSKTGKHGHAKVHLVGIDIFTGKKYEDICPSTHNMDVPNIKRNDFQLIGIQDGYLSLLQDSGEVREDLRLPEGDLGKEIEQKYDCGEEILITVLSAMTEEAAVAIKAMAKXLAPRMAVVAAVIL

SEQ ID NO: 255 - protein, 644 aa, Homo Sapiens
  misc_feature (626)..(626): Xaa can be any naturally occurring amino acid
MDRGTLPLAVALLLASCSLSPTSLAETVHCDLQPVGPERGEVTYTTSQVSKGCVAQAPNAILEVHVLFLEFPTGPSQLELTLQASKQNGTWPREVLLVLSVNSSVFLHLQALGIPLHLAYNSSLVTFQEPPGVNTTELPSFPKTQILEWAAERGPITSAAELNDPQSILLRLGQAQGSLSFCMLEASQDMGRTLEWRPRTPALVRGCHLEGVAGHKEAHILRVLPGHSAGPRTVTVKVELSCAPGDLDAVLILQGPPYVSWLIDANHNMQIWTTGEYSFKIFPEKNIRGFKLPDTPQGLLGEARMLNASIVASFVELPLASIVSLHASSCGGRLQTSPAPIQTTPPKDTCSPELLMSLIQTKCADDAMTLVLKKELVAHLKCTITGLTFWDPSCEAEDRGDKFVLRSAYSSCGMQVSASMISNEAVVNILSSSSPQRKKVHCLNMDSLSFQLGLYLSPHFLQASNTIEPGQQSFVQVRVSPSVSEFLLQLDSCHLDLGPEGGTVELIQGRAAKGNCVSLLSPSPEGDPRFSFLLHFYTVPIPKTGTLSCTVALRPKTGSQDQEVHRTVFMRLNIISPDLSGCTSKGLVLPAVLGITFGAFLIGALLTAALWYIYSHTREYPRPPQXACRAPPSTRGSPVKPLRD

SEQ ID NO: 256 - protein, 471 aa, Homo Sapiens
  misc_feature (435)..(435): Xaa can be any naturally occurring amino acid
MSILKIHAREIFDSRGNPTVEVDLFTSKGLFRAAVPSGASTGIYEALELRDNDKTRYMGKGVSKAVEHINKTIAPALVSKKLNVTEQEKIDKLMIEMDGTENKSKFGANAILGVSLAVCKAGAVEKGVPLYRHIADLAGNSEVILPVPAFNVINGGSHAGNKLAMQEFMILPVGAANFREAMRIGAEVYHNLKNVIKEKYGKDATNVGDEGGFAPNILENKEGLELLKTAIGKAGYTDKVVIGMDVAASEFFRSGKYDLDFKSPDDPSRYISPDQLADLYKSFIKDYPVVSIEDPFDQDDWGAWQKFTASAGIQVVGDDLTVTNPKRIAKAVNEKSCNCLLLKVNQIGSVTESLQACKLAQANGWGVMVSHRSGETEDTFIADLVVGLCTGQIKTGAPCRSERLAKYNQLLRIEEELGSKAKFAGRNFRNPLAKXAVGRQALRSPVGYTDPSPRVSSGSSRPPTNTCRGPC

SEQ ID NO: 257 - protein, 934 aa, Homo Sapiens
  misc_feature (871)..(871): Xaa can be any naturally occurring amino acid
MTADKEKKRSSSERRKEKSRDAARCRRSKETEVFYELAHELPLPHSVSSHLDKASIMRLAISFLRTHKLLSSVCSENESEAEADQQMDNLYLKALEGFIAVVTQDGDMIFLSENISKFMGLTQVELTGHSIFDFTHPCDHEEIRENLSLKNGSGFGKKSKDMSTERDFFMRMKCTVTNRGRTVNLKSATWKVLHCTGQVKVYNNCPPHNSLCGYKEPLLSCLIIMCEPIQHPSHMDIPLDSKTFLSRHSMDMKFTYCDDRITELIGYHPEELLGRSAYEFYHALDSENMTKSHQNLCTKGQVVSGQYRMLAKHGGYVWLETQGTVIYNPRNLQPQCIMCVNYVLSEIEKNDVVFSMDQTESLFKPHLMAMNSIFDSSGKGAVSEKSNFLFTKLKEEPEELAQLAPTPGDAIISLDFGNQNFEESSAYGKAILPPSQPWATELRSHSTQSEAGSLPAFTVPQAAAPGSTTPSATSSSSSCSTPNSPEDYYTSLDNDLKIEVIEKLFAMDTEAKDQCSTQTDFNELDLETLAPYIPMDGEDFQLSPICPEERLLAENPQSTPQHCFSAMTNIFQPLAPVAPHSPFLLDKFQQQLESKKTEPEHRPMSSIFFDAGSKASLPPCCGQASTPLSSMGGRSNTQWPPDPPLHFGPTKWAVGDQRTEFLGAAPLGPPVSPPHVSTFKTRSAKGFGARGPDVLSPAMVALSNKLKLKRQLEYEEQAFQDLSGGDPPGGSTSHLMWKRMKNLRGGSCPLMPDKPLSANVPNDKFTQNPMRGLGHPLRHLPLPQPPSAISPGENSKSRFPPQCYATQYQDYSLSSAHKVSGMASRLLGPSFESYLLPELTRYDCEVNVPVLGSSTLLQGGDLLRALDQATXARPSTWAAPLPTPSHQLHSLRLFLQLGISNASTLFTRWTYLADLPRSPSSGLFLRCSLYYPYF

SEQ ID NO: 258 - protein, 1034 aa, Homo Sapiens
  misc_feature (984)..(984): Xaa can be any naturally occurring amino acid
MDCQLSILLLLSCSVLDSFGELIPQPSNEVNLLDSKTIQGELGWISYPSHGWEEISGVDEHYTPIRTYQVCNVMDHSQNNWLRTNWVPRNSAQKIYVELKFTLRDCNSIPLVLGTCKETFNLYYMESDDDHGVKFREHQFTKIDTIAADESFTQMDLGDRILKLNTEIREVGPVNKKGFYLAFQDVGACVALVSVRVYFKKCPFTVKNLAMFPDTVPMDSQSLVEVRGSCVNNSKEEDPPRMYCSTEGEWLVPIGKCSCNAGYEERGFMCQACRPGFYKALDGNMKCAKCPPHSSTQEDGSMNCRCENNYFRADKDPPSMACTRPPSSPRNVISNINETSVILDWSWPLDTGGRKDVTFNIICKKCGWNIKQCEPCSPNVRFLPRQFGLTNTTVTVTDLLAHTNYTFEIDAVNGVSELSSPPRQFAAVSITTNQAAPSPVLTIKKDRTSRNSISLSWQEPEHPNGIILDYEVKYYEKQEQETSYTILRARGTNVTISSLKPDTIYVFQIRARTAAGYGTNSRKFEFETSPDSFSISGESSQVVMIAISAAVAIILLTVVIYVLIGRFCGYKSKHGADEKRLHFGNGHLKLPGLRTYVDPHTYEDPTQAVHEFAKELDATNISIDKVVGAGEFGEVCSGRLKLPSKKEISVAIKTLKVGYTEKQRRDFLGEASIMGQFDHPNIIRLEGVVTKSKPVMIVTEYMENGSLDSFLRKHDAQFTVIQLVGMLRGIASGMKYLSDMGYVHRDLAARNILINSNLVCKVSDFGLSRVLEDDPEAAYTTRGGKIPIRWTSPEAIAYRKFTSASDVWSYGIVLWEVMSYGERPYWEMSNQDVIKAVDEGYRLPPPMDCPAALYQLMLDCWQKDRNNRPKFEQIVSILDKLIRNPGSLKIITSAAARPSNLLLDQSNVDITTFRTTGDWLNGVWTAHCKEIFTGVEYSSCDTIAKISTDDMKKVGVTVVGPQKKIISSIKALETQSKNGPVPVXSTGRKCFWTEVVAVEGVASSCRQTIILEILVEVPSPIRHSNMSTNALKWN

SEQ ID NO: 259 - protein, 991 aa, Homo Sapiens
  misc_feature (987)..(987): Xaa can be any naturally occurring amino acid
MAGIFYFALFSCLFGICDAVTGSRVYPANEVTLLDSRSVQGELGWIASPLEGGWEEVSIMDEKNTPIRTYQVCNVMEPSQNNWLRTDWITREGAQRVYIEIKFTLRDCNSLPGVMGTCKETFNLYYYESDNDKERFIRENQFVKIDTIAADESFTQVDIGDRIMKLNTEIRDVGPLSKKGFYLAFQDVGACIALVSVRVFYKKCPLTVRNLAQFPDTITGADTSSLVEVRGSCVNNSEEKDVPKMYCGADGEWLVPIGNCLCNAGHEERSGECQACKIGYYKALSTDATCAKCPPHSYSVWEGATSCTCDRGFFRADNDAASMPCTRPPSAPLNLISNVNETSVNLEWSSPQNTGGRQDISYNVVCKKCGAGDPSKCRPCGSGVHYTPQQNGLKTTKVSITDLLAHTNYTFEIWAVNGVSKYNPNPDQSVSVTVTTNQAAPSSIALVQAKEVTRYSVALAWLEPDRPNGVILEYEVKYYEKDQNERSYRIVRTAARNTDIKGLNPLTSYVFHVRARTAAGYGDFSEPLEVTTNTVPSRIIGDGANSTVLLVSVSGSVVLVVILIAAFVISRRRSKYSKAKQEADEEKHLNQGVRTYVDPFTYEDPNQAVREFAKEIDASCIKIEKVIGVGEFGEVCSGRLKVPGKREICVAIKTLKAGYTDKQRRDFLSEASIMGQFDHPNIIHLEGVVTKCKPVMIITEYMENGSLDAFLRKNDGRFTVIQLVGMLRGIGSGMKYLSDMSYVHRDLAARNILVNSNLVCKVSDFGMSRVLEDDPEAAYTTRGGKIPIRWTAPEAIAYRKFTSASDVWSYGIVMWEVMSYGERPYWDMSNQDVIKAIEEGYRLPPPMDCPIALHQLMLDCWQKERSDRPKFGQIVNMLDKLIRNPNSLKRTGTESSRPNTALLDPSSPEFSAVVSVGDWLQAIKMDRYKDNFTAAGYTTLEAVVHVNQEDLARIGITAITHQNKILSSVQAMRTQMQQMHGRMVPVXASTE

SEQ ID NO: 260 - protein, 1049 aa, Homo Sapiens
  misc_feature (1006)..(1006): Xaa can be any naturally occurring amino acid
MAPARGRLPPALWVVTAAAAAATCVSAARGEVNLLDTSTIHGDWGWLTYPAHGWDSINEVDESFQPIHTYQVCNVMSPNQNNWLRTSWVPRDGARRVYAEIKFTLRDCNSMPGVLGTCKETFNLYYLESDRDLGASTQESQFLKIDTIAADESFTGADLGVRRLKLNTEVRSVGPLSKRGFYLAFQDIGACLAILSLRIYYKKCPAMVRNLAAFSEAVTGADSSSLVEVRGQCVRHSEERDTPKMYCSAEGEWLVPIGKCVCSAGYEERRDACVACELGFYKSAPGDQLCARCPPHSHSAAPAAQACHCDLSYYRAALDPPSSACTRPPSAPVNLISSVNGTSVTLEWAPPLDPGGRSDITYNAVCRRCPWALSRCEACGSGTRFVPQQTSLVQASLLVANLLAHMNYSFWIEAVNGVSDLSPEPRRAAVVNITTNQAAPSQVVVIRQERAGQTSVSLLWQEPEQPNGIILEYEIKYYEKDKEMQSYSTLKAVTTRATVSGLKPGTRYVFQVRARTSAGCGRFSQAMEVETGKPRPRYDTRTIVWICLTLITGLVVLLLLLICKKRHCGYSKAFQDSDEEKMHYQNGQAPPPVFLPLHHPPGKLPEPQFYAEPHTYEEPGRAGRSFTREIEASRIHIEKIIGSGDSGEVCYGRLRVPGQRDVPVAIKALKAGYTERQRRDFLSEASIMGQFDHPNIIRLEGVVTRGRLAMIVTEYMENGSLDTFLRTHDGQFTIMQLVGMLRGVGAGMRYLSDLGYVHRDLAARNVLVDSNLVCKVSDFGLSRVLEDDPDAAYTTTGGKIPIRWTAPEAIAFRTFSSASDVWSFGVVMWEVLAYGERPYWNMTNRDVISSVEEGYRLPAPMGCPHALHQLMLDCWHKDRAQRPRFSQIVSVLDALIRSPESLRATATVSRCPPPAFVRSCFDLRGGSGGGGGLTVGDWLDSIRMGRYRDHFAAGGYSSLGMVLRMNAQDVRALGITLMGHQKKILGSIQTMRAQLTSTQGPRRHLXCTASRAQAATKPTPGHASGRGREGLAAGRAAPGLCPPLRCWRS

SEQ ID NO: 261 - protein, 1087 aa, Homo Sapiens
  misc_feature (988)..(988): Xaa can be any naturally occurring amino acid
MALRRLGAALLLLPLLAAVEETLMDSTTATAELGWMVHPPSGWEEVSGYDENMNTIRTYQVCNVFESSQNNWLRTKFIRRRGAHRIHVEMKFSVRDCSSIPSVPGSCKETFNLYYYEADFDSATKTFPNWMENPWVKVDTIAADESFSQVDLGGRVMKINTEVRSFGPVSRSGFYLAFQDYGGCMSLIAVRVFYRKCPRIIQNGAIFQETLSGAESTSLVAARGSCIANAEEVDVPIKLYCNGDGEWLVPIGRCMCKAGFEAVENGTVCRGCPSGTFKANQGDEACTHCPINSRTTSEGATNCVCRNGYYRADLDPLDMPCTTIPSAPQAVISSVNETSLMLEWTPPRDSGGREDLVYNIICKSCGSGRGACTRCGDNVQYAPRQLGLTEPRIYISDLLAHTQYTFEIQAVNGVTDQSPFSPQFASVNITTNQAAPSAVSIMHQVSRTVDSITLSWSQPDQPNGVILDYELQYYEKELSEYNATAIKSPTNTVTVQGLKAGAIYVFQVRARTVAGYGRYSGKMYFQTMTEAEYQTSIQEKLPLIIGSSAAGLVFLIAVVVIAIVCNRRRGFERADSEYTDKLQHYTSGHMTPGMKIYIDPFTYEDPNEAVREFAKEIDISCVKIEQVIGAGEFGEVCSGHLKLPGKREIFVAIKTLKSGYTEKQRRDFLSEASIMGQFDHPNVIHLEGVVTKSTPVMIITEFMENGSLDSFLRQNDGQFTVIQLVGMLRGIAAGMKYLADMNYVHRDLAARNILVNSNLVCKVSDFGLSRFLEDDTSDPTYTSALGGKIPIRWTAPEAIQYRKFTSASDVWSYGIVMWEVMSYGERPYWDMTNQDVINAIEQDYRLPPPMDCPSALHQLMLDCWQKDRNHRPKFGQIVNTLDKMIRNPNSLKAMAPLSSGINLPLLDRTIPDYTSFNTVDEWLEAIKMGQYKESFANAGFTSFDVVSQMMMEDILRVGVTLAGHQKKILNSIQVMRAQMNQIQSVEVXHSPASAHLFLQAPPPLPHVPALLVLYPLQGQPLARRPRATGRTKRCQPRDVTKKTCNSNDGKKKGMGKKKTDPGRGREIQGIFFKEDSHKESNDCSCGG

SEQ ID NO: 262 - protein, 1086 aa, Homo Sapiens
  misc_feature (987)..(987): Xaa can be any naturally occurring amino acid
MALRRLGAALLLLPLLAAVEETLMDSTTATAELGWMVHPPSGWEEVSGYDENMNTIRTYQVCNVFESSQNNWLRTKFIRRRGAHRIHVEMKFSVRDCSSIPSVPGSCKETFNLYYYEADFDSATKTFPNWMENPWVKVDTIAADESFSQVDLGGRVMKINTEVRSFGPVSRSGFYLAFQDYGGCMSLIAVRVFYRKCPRIIQNGAIFQETLSGAESTSLVAARGSCIANAEEVDVPIKLYCNGDGEWLVPIGRCMCKAGFEAVENGTVCRGCPSGTFKANQGDEACTHCPINSRTTSEGATNCVCRNGYYRADLDPLDMPCTTIPSAPQAVISSVNETSLMLEWTPPRDSGGREDLVYNIICKSCGSGRGACTRCGDNVQYAPRQLGLTEPRIYISDLLAHTQYTFEIQAVNGVTDQSPFSPQFASVNITTNQAAPSAVSIMHQVSRTVDSITLSWSQPDQPNGVILDYELQYYEKELSEYNATAIKSPTNTVTVQGLKAGAIYVFQVRARTVAGYGRYSGKMYFQTMTEAEYQTSIQEKLPLIIGSSAAGLVFLIAVVVIAIVCNRRGFERADSEYTDKLQHYTSGHMTPGMKIYIDPFTYEDPNEAVREFAKEIDISCVKIEQVIGAGEFGEVCSGHLKLPGKREIFVAIKTLKSGYTEKQRRDFLSEASIMGQFDHPNVIHLEGVVTKSTPVMIITEFMENGSLDSFLRQNDGQFTVIQLVGMLRGIAAGMKYLADMNYVHRDLAARNILVNSNLVCKVSDFGLSRFLEDDTSDPTYTSALGGKIPIRWTAPEAIQYRKFTSASDVWSYGIVMWEVMSYGERPYWDMTNQDVINAIEQDYRLPPPMDCPSALHQLMLDCWQKDRNHRPKFGQIVNTLDKMIRNPNSLKAMAPLSSGINLPLLDRTIPDYTSFNTVDEWLEAIKMGQYKESFANAGFTSFDVVSQMMMEDILRVGVTLAGHQKKILNSIQVMRAQMNQIQSVEVXHSPASAHLFLQAPPPLPHVPALLVLYPLQGQPLARRPRATGRTKRCQPRDVTKKTCNSNDGKKKGMGKKKTDPGRGREIQGIFFKEDSHKESNDCSCGG

SEQ ID NO: 263 - protein, 1006 aa, Homo Sapiens
  misc_feature (999)..(999): Xaa can be any naturally occurring amino acid
MARARPPPPPSPPPGLLPLLPPLLLLPLLLLPAGCRALEETLMDTKWVTSELAWTSHPESGWEEVSGYDEAMNPIRTYQVCNVRESSQNNWLRTGFIWRRDVQRVYVELKFTVRDCNSIPNIPGSCKETFNLFYYEADSDVASASSPFWMENPYVKVDTIAPDESFSRLDAGRVNTKVRSFGPLSKAGFYLAFQDQGACMSLISVRAFYKKCASTTAGFALFPETLTGAEPTSLVIAPGTCIPNAVEVSVPLKLYCNGDGEWMVPVGACTCATGHEPAAKESQCRPCPPGSYKAKQGEGPCLPCPPNSRTTSPAASICTCHNNFYRADSDSADSACTTVPSPPRGVISNVNETSLILEWSEPRDLGGRDDLLYNVICKKCHGAGGASACSRCDDNVEFVPRQLGLTERRVHISHLLAHTRYTFEVQAVNGVSGKSPLPPRYAAVNITTNQAAPSEVPTLRLHSSSGSSLTLSWAPPERPNGVILDYEMKYFEKSEGIASTVTSQMNSVQLDGLRPDARYVVQVRARTVAGYGQYSRPAEFETTSERGSGAQQLQEQLPLIVGSATAGLVFVVAVVVIAIVCLRKQRHGSDSEYTEKLQQYIAPGMKVYIDPFTYEDPNEAVREFAKEIDVSCVKIEEVIGAGEFGEVCRGRLKQPGRREVFVAIKTLKVGYTERQRRDFLSEASIMGQFDHPNIIRLEGVVTKSRPVMILTEFMENCALDSFLRLNDGQFTVIQLVGMLRGIAAGMKYLSEMNYVHRDLAARNILVNSNLVCKVSDFGLSRFLEDDPSDPTYTSSLGGKIPIRWTAPEAIAYRKFTSASDVWSYGIVMWEVMSYGERPYWDMSNQDVINAVEQDYRLPPPMDCPTALHQLMLDCWVRDRNLRPKFSQIVNTLDKLIRNAASLKVIASAQSGMSQPLLDRTVPDYTTFTTVGDWLDAIKMGRYKESFVSAGFASFDLVAQMTAEDLLRIGVTLAGHQKKILSSIQDMRLQMNQTLPVQVXHRLPRGP

SEQ ID NO: 264 - protein, 1022 aa, Homo Sapiens
  misc_feature (988)..(988): Xaa can be any naturally occurring amino acid
MELRVLLCWASLAAALEETLLNTKLETADLKWVTFPQVDGQWEELSGLDEEQHSVRTYEVCDVQRAPGQAHWLRTGWVPRRGAVHVYATLRFTMLECLSLPRAGRSCKETFTVFYYESDADTATALTPAWMENPYIKVDTVAAEHLTRKRPGAEATGKVNVKTLRLGPLSKAGFYLAFQDQGACMALLSLHLFYKKCAQLTVNLTRFPETVPRELVVPVAGSCVVDAVPAPGPSPSLYCREDGQWAEQPVTGCSCAPGFEAAEGNTKCRACAQGTFKPLSGEGSCQPCPANSHSNTIGSAVCQCRVGYFRARTDPRGAPCTTPPSAPRSVVSRLNGSSLHLEWSAPLESGGREDLTYALRCRECRPGGSCAPCGGDLTFDPGPRDLVEPWVVVRGLRPDFTYTFEVTALNGVSSLATGPVPFEPVNVTTDREVPPAVSDIRVTRSSPSSLSLAWAVPRAPSGAVLDYEVKYHEKGAEGPSSVRFLKTSENRAELRGLKRGASYLVQVRARSEAGYGPFGQEHHSQTQLDESEGWREQLALIAGTAVVGVVLVLVVIVVAVLCLRKQSNGREAEYSDKHGQYLIGHGTKVYIDPFTYEDPNEAVREFAKEIDVSYVKIEEVIGAGEFGEVCRGRLKAPGKKESCVAIKTLKGGYTERQRREFLSEASIMGQFEHPNIIRLEGVVTNSMPVMILTEFMENGALDSFLRLNDGQFTVIQLVGMLRGIASGMRYLAEMSYVHRDLAARNILVNSNLVCKVSDFGLSRFLEENSSDPTYTSSLGGKIPIRWTAPEAIAFRKFTSASDAWSYGIVMWEVMSFGERPYWDMSNQDVINAIEQDYRLPPPPDCPTSLHQLMLDCWQKDRNARPRFPQVVSALDKMIRNPASLKIVARENGGASHPLLDQRQPHYSAFGSVGEWLRAIKMGRYEESFAAAGFGSFELVSQISAEDLLRIGVTLAGHQKKILASVQHMKSQAKPGTPGGTGGPAPQYXPAGTPHPRDTASPFSGAEWGLTEAPSPVPRWIAL

SEQ ID NO: 265 - protein, 484 aa, Homo Sapiens
  misc_feature (456)..(456): Xaa can be any naturally occurring amino acid
MWLEILLTSVLGFAIYWFISRDKEETLPLEDGWWGPGTRSAAREDDSIRPFKVETSDEEIHDLHQRIDKFRFTPPLEDSCFHYGFNSNYLKKVISYWRNEFDWKKQVEILNRYPHFKTKIEGLDIHFIHVKPPQLPAGHTPKPLLMVHGWPGSFYEFYKIIPLLTDPKNHGLSDEHVFEVICPSIPGYGFSEASSKKGFNSVATARIFYKLMLRLGFQEFYIQGGDWGSLICTNMAQLVPSHVKGLHLNMALVLSNFSTLTLLLGQRFGRFLGLTERDVELLYPVKEKVFYSLMRESGYMHIQCTKPDTVGSALNDSPVGLAAYILEKFSTWTNTEFRYLEDGGLERKFSLDDLLTNVMLYWTTGTIISSQRFYKENLGQGWMTQKHERMKVYVPTGFSAFPFELLHTPEKWVRFKYPKLISYSYMVRGGHFAAFEEPELLAQDIRKFLSVLERQXPTPLPPPATSPHKCPPGFSWGRYPFSEE

SEQ ID NO: 266 - protein, 241 aa, Homo Sapiens
  misc_feature (194)..(194): Xaa can be any naturally occurring amino acid
MGVHECPAWLWLLLSLLSLPLGLPVLGAPPRLICDSRVLERYLLEAKEAENITTGCAEHCSLNENITVPDTKVNFYAWKRMEVGQQAVEVWQGLALLSEAVLRGQALLVNSSQPWEPLQLHVDKAVSGLRSLTTLLRALGAQKEAISPPDAASAAPLRTITADTFRKLFRVYSNFLRGKLKLYTGEACRTGDRXPGVSTWAYPPPPSPTLLVPHPPPPLLNPVEGLSAQRQPVPWTLQCQQ

SEQ ID NO: 267 - protein, 189 aa, Homo Sapiens
  misc_feature (184)..(184): Xaa can be any naturally occurring amino acid
MRANDALQVLGLLFSLARGSEVGNSQAVCPGTLNGLSVTGDAENQYQTLYKLYERCEVVMGNLEIVLTGHNADLSFLQWIREVTGYVLVAMNEFSTLPLPNLRVVRGTQVYDGKFAIFVMLNYNTNSSHALRQLRLTQLTGQFPMVPSGLTPQPAQDWYLLDDDPRLLTLSASSKVPVTLAAVXRSIAP

SEQ ID NO: 268 - protein, 1402 aa, Homo Sapiens
  misc_feature (1343)..(1343): Xaa can be any naturally occurring amino acid
MRANDALQVLGLLFSLARGSEVGNSQAVCPGTLNGLSVTGDAENQYQTLYKLYERCEVVMGNLEIVLTGHNADLSFLQWIREVTGYVLVAMNEFSTLPLPNLRVVRGTQVYDGKFAIFVMLNYNTNSSHALRQLRLTQLTEILSGGVYIEKNDKLCHMDTIDWRDIVRDRDAEIVVKDNGRSCPPCHEVCKGRCWGPGSEDCQTLTKTICAPQCNGHCFGPNPNQCCHDECAGGCSGPQDTDCFACRHFNDSGACVPRCPQPLVYNKLTFQLEPNPHTKYQYGGVCVASCPHNFVVDQTSCVRACPPDKMEVDKNGLKMCEPCGGLCPKACEGTGSGSRFQTVDSSNIDGFVNCTKILGNLDFLITGLNGDPWHKIPALDPEKLNVFRTVREITGYLNIQSWPPHMHNFSVFSNLTTIGGRSLYNRGFSLLIMKNLNVTSLGFRSLKEISAGRIYISANRQLCYHHSLNWTKVLRGPTEERLDIKHNRPRRDCVAEGKVCDPLCSSGGCWGPGPGQCLSCRNYSRGGVCVTHCNFLNGEPREFAHEAECFSCHPECQPMEGTATCNGSGSDTCAQCAHFRDGPHCVSSCPHGVLGAKGPIYKYPDVQNECRPCHENCTQGCKGPELQDCLGQTLVLIGKTHLTMALTVIAGLVVIFMMLGGTFLYWRGRRIQNKRAMRRYLERGESIEPLDPSEKANKVLARIFKETELRKLKVLGSGVFGTVHKGVWIPEGESIKIPVCIKVIEDKSGRQSFQAVTDHMLAIGSLDHAHIVRLLGLCPGSSLQLVTQYLPLGSLLDHVRQHRGALGPQLLLNWGVQIAKGMYYLEEHGMVHRNLAARNVLLKSPSQVQVADFGVADLLPPDDKQLLYSEAKTPIKWMALESIHFGKYTHQSDVWSYGVTVWELMTFGAEPYAGLRLAEVPDLLEKGERLAQPQICTIDVYMVMVKCWMIDENIRPTFKELANEFTRMARDPPRYLVIKRESGPGIAPGPEPHGLTNKKLEEVELEPELDLDLDLEAEEDNLATTTLGSALSLPVGTLNRPRGSQSLLSPSSGYMPMNQGNLGESCQESAVSGSSERCPRPVSLHPMPRGCLASESSEGHVTGSEAELQEKVSMCRSRSRSRSPRPRGDSAYHSQRHSLLTPVTPLSPPGLEEEDVNGYVMPDTHLKGTPSSREGTLSSVGLSSVLGTEEEDEDEEYEYMNRRRRHSPPHPPRPSSLEELGYEYMDVGSDLSASLGSTQSCPLHPVPIMPTAGTTPDEDYEYMNRQRDGGGPGGDYAAMGACPASEQGYEEMRAFQGPGHQAPHVHYARLKTLRSLEATDSAFDNPDYWHSRLFPKANAQRTXLLLPVALREHLMAASAFRGYRLLPIPSLSQVPAPFPQSQTIPFNLWRLLNILTQNSYGM

SEQ ID NO: 269 - protein, 1341 aa, Homo Sapiens
  misc_feature (1309)..(1309): Xaa can be any naturally occurring amino acid
MKPATGLWVWVSLLVAAGTVQPSDSQSVCAGTENKLSSLSDLEQQYRALRKYYENCEVVMGNLEITSIEHNRDLSFLRSVREVTGYVLVALNQFRYLPLENLRIIRGTKLYEDRYALAIFLNYRKDGNFGLQELGLKNLTEILNGGVYVDQNKFLCYADTIHWQDIVRNPWPSNLTLVSTNGSSGCGRCHKSCTGRCWGPTENHCQTLTRTVCAEQCDGRCYGPYVSDCCHRECAGGCSGPKDTDCFACMNFNDSGACVTQCPQTFVYNPTTFQLEHNFNAKYTYGAFCVKKCPHNFVVDSSSCVRACPSSKMEVEENGIKMCKPCTDICPKACDGIGTGSLMSAQTVDSSNIDKFINCTKINGNLIFLVTGIHGDPYNAIEAIDPEKLNVFRTVREITGFLNIQSWPPNMTDFSVFSNLVTIGGRVLYSGLSLLILKQQGITSLQFQSLKEISAGNIYITDNSNLCYYHTINWTTLFSTINQRIVIRDNRKAENCTAEGMVCNHLCSSDGCWGPGPDQCLSCRRFSRGRICIESCNLYDGEFREFENGSICVECDPQCEKMEDGLLTCHGPGPDNCTKCSHFKDGPNCVEKCPDGLQGANSFIFKYADPDRECHPCHPNCTQGCNGPTSHDCIYYPWTGHSTLPQHARTPLIAAGVIGGLFILVIVGLTFAVYVRRKSIKKKRALRRFLETELVEPLTPSGTAPNQAQLRILKETELKRVKVLGSGAFGTVYKGIWVPEGETVKIPVAIKILNETTGPKANVEFMDEALIMASMDHPHLVRLLGVCLSPTIQLVTQLMPHGCLLEYVHEHKDNIGSQLLLNWCVQIAKGMMYLEERRLVHRDLAARNVLVKSPNHVKITDFGLARLLEGDEKEYNADGGKMPIKWMALECIHYRKFTHQSDVWSYGVTIWELMTFGGKPYDGIPTREIPDLLEKGERLPQPPICTIDVYMVMVKCWMIDADSRPKFKELAAEFSRMARDPQRYLVIQGDDRMKLPSPNDSKFFQNLLDEEDLEDMMDAEEYLVPQAFNIPPPIYTSRARIDSNRSEIGHSPPPAYTPMSGNQFVYRDGGFAAEQGVSVPYRAPTSTIPEAPVAQGATAEIFDDSCCNGTLRKPVAPHVQEDSSTQRYSADPTVFAPERSPRGELDEEGYMTPMRDKPKQEYLNPVEENPFVSRRKNGDLQALDNPEYHNASNGPPKAEDEYVNEPLYLNTFANTLGKAEYLKNNILSMPEKAKKAFDNPDYWNHSLPPRSTLQHPDYLQEYSTKYFYKQNGRIRPIVAENPEYLSEFSLKPGTVLPPPPYRHRNTVVXAQLWFFRWRDTPAPISPPPSLSLVVFLLPQGQ

SEQ ID NO: 270 - protein, 767 aa, Homo Sapiens
  misc_feature (761)..(761): Xaa can be any naturally occurring amino acid
MKLNVDGLLVYFPYDYIYPEQFSYMRELKRTLDAKGHGVLEMPSGTGKTVSLLALIMAYQRAYPLEVTKLIYCSRTVPEIEKVIEELRKLLNFYEKQEGEKLPFLGLALSSRKNLCIHPEVTPLRFGKDVDGKCHSLTASYVRAQYQHDTSLPHCRFYEEFDAHGREVPLPAGIYNLDDLKALGRRQGWCPYFLARYSILHANVVVYSYHYLLDPKIADLVSKELARKAVVVFDEAHNIDNVCIDSMSVNLTRRTLDRCQGNLETLQKTVLRIKETDEQRLRDEYRRLVEGLREASAARETDAHLANPVLPDEVLQEAVPGSIRTAEHFLGFLRRLLEYVKWRLRVQHVVQESPPAFLSGLAQRVCIQRKPLRFCAERLRSLLHTLEITDLADFSPLTLLANFATLVSTYAKGFTIIIEPFDDRTPTIANPILHFSCMDASLAIKPVFERFQSVIITSGTLSPLDIYPKILDFHPVTMATFTMTLARVCLCPMIIGRGNDQVAISSKFETREDIAVIRNYGNLLLEMSAVVPDGIVAFFTSYQYMESTVASWYEQGILENIQRNKLLFIETQDGAETSVALEKYQEACENGRGAILLSVARGKVSEGIDFVHHYGRAVIMFGVPYVYTQSRILKARLEYLRDQFQIRENDFLTFDAMRHAAQCVGRAIRGKTDYGLMVFADKRFARGDKRGKLPRWIQEHLTDANLNLTVDEGVQVAKYFLRQMAQPFHREDQLGLSLLSLEQLESEETLKRIEQIAQQLXVGRVGP

SEQ ID NO: 271 - protein, 805 aa, Homo Sapiens
  misc_feature (783)..(783): Xaa can be any naturally occurring amino acid
MGKRDRADRDKKKSRKRHYEDEEDDEEDAPGNDPQEAVPSAAGKQVDESGTKVDEYGAKDYRLQMPLKDDHTSRPLWVAPDGHIFLEAFSPVYKYAQDFLVAIAEPVCRPTHVHEYKLTAYSLYAAVSVGLQTSDITEYLRKLSKTGVPDGIMQFIKLCTVSYGKVKLVLKHNRYFVESCHPDVIQHLLQDPVIRECRLRNSEGEATELITETFTSKSAISKTAESSGGPSTSRVTDPQGKSDIPMDLFDFYEQMDKDEEEEEETQTVSFEVKQEMIEELQKRCIHLEYPLLAEYDFRNDSVNPDINIDLKPTAVLRPYQEKSLRKMFGNGRARSGVIVLPCGAGKSLVGVTAACTVRKRCLVLGNSAVSVEQWKAQFKMWSTIDDSQICRFTSDAKDKPIGCSVAISTYSMLGHTTKRSWEAERVMEWLKTQEWGLMILDEVHTIPAKMFRRVLTIVQAHCKLGLTATLVREDDKIVDLNFLIGPKLYEANWMELQNNGYIAKVQCAEVWCPMSPEFYREYVAIKTKKRILLYTMNPNKFRACQFLIKFHERRNDKIIVFADNVFALKEYAIRLNKPYIYGPTSQGERMQILQNFKHNPKINTIFISKVGDTSFDLPEANVLIQISSHGGSRRQEAQRLGRVLRAKKGMVAEEYNAFFYSLVSQDTQEMAYSTKRQRFLVDQGYSFKVITKLAGMEEEDLAFSTKEEQQQLLQKVLAATDLDAEEEVVAGEFGSRSSQASRRFGTMSSMSGADDTVYMEYHSSRSKAPSKHVHPLFKRFRKXCLGRVLRSRPALGTLVGKGFSA

SEQ ID NO: 272 - protein, 1194 aa, Homo Sapiens
  misc_feature (1187)..(1187): Xaa can be any naturally occurring amino acid
MGVQGLWKLLECSGRQVSPEALEGKILAVDISIWLNQALKGVRDRHGNSIENPHLLTLFHRLCKLLFFRIRPIFVFDGDAPLLKKQTLVKRRQRKDLASSDSRKTTEKLLKTFLKRQAIKTAFRSKRDEALPSLTQVRRENDLYVLPPLQEEEKHSSEEEDEKEWQERMNQKQALQEEFFHNPQAIDIESEDFSSLPPEVKHEILTDMKEFTKRRRTLFEAMPEESDDFSQYQLKGLLKKNYLNQHIEHVQKEMNQQHSGHIRRQYEDEGGFLKEVESRRVVSEDTSHYILIKGIQAKTVAEVDSESLPSSSKMHGMSFDVKSSPCEKLKTEKEPDATPPSPRTLLAMQAALLGSSSEEELESENRRQARGRNAPAAVDEGSISPRTLSAIKRALDDDEDVKVCAGDDVQTGGPGAEEMRINSSTENSDEGLKVRDGKGIPFTATLASSSVNSAEEHVASTNEGREPTDSVPKEQMSLVHVGTEAFPISDESMIKDRKDRLPLESAVVRHSDAPGLPNGRELTPASPTCTNSVSKNETHAEVLEQQNELCPYESKFDSSLLSSDDETKCKPNSASEVIGPVSLQETSSIVSVPSEAVDNVENVVSFNAKEHENFLETIQEQQTTESAGQDLISIPKAVEPMEIDSEESESDGSFIEVQSVISDEELQAEFPETSKPPSEQGEEELVGTREGEAPAESESLLRDNSERDDVDGEPQEAEKDAEDSLHEWQDINLEELETLESNLLAQQNSLKAQKQQQERIAATVTGQMFLESQELLRLFGIPYIQAPMEAEAQCAILDLTDQTSGTITDDSDIWLFGARHVYRNFFNKNKFVEYYQYVDFHNQLGLDRNKLINLAYLLGSDYTEGIPTVGCVTAMEILNEFPGHGLEPLLKFSEWWHEAQKNPKIRPNPHDTKVKKKLRTLQLTPGFPNPAVAEAYLKPVVDDSKGSFLWGKPDLDKIREFCQRYFGWNRTKTDESLFPVLKQLDAQQTQLRIDSFFRLAQQEKEDAKRIKSQRLNRAVTCMLRKEKEAAASEIEAVSVAMEKEFELLDKAKRKTQKRGITNTLEESSSLKRKRLSDSKRKNTCGGFLGETCLSESSDGSSSEDAESSSLMNVQRRTAAKEPKTSASDSQNSVKEAPVKNGGATTSSSSDSDDDGGKEKMVLVTARSVFGKKRRKLRRARGRKRKTXLKNMYPL

SEQ ID NO: 273 - protein, 1506 aa, Homo Sapiens
  misc_feature (1494)..(1494): Xaa can be any naturally occurring amino acid
MPNEGIPHSSQTQEQDCLQSQPVSNNEEMAIKQESGGDGEVEEYLSFRSVGDGLSTSAVGCASAAPRRGPALLHIDRHQIQAVEPSAQALELQGLGVDVYDQDVLEQGVLQQVDNAIHEASRASQLVDVEKEYRSVLDDLTSCTTSLRQINKIIEQLSPQAATSRDINRKLDSVKRQKYNKEQQLKKITAKQKHLQAILGGAEVKIELDHASLEEDAEPGPSSLGSMLMPVQETAWEELIRTGQMTPFGTQIPQKQEKKPRKIMLNEASGFEKYLADQAKLSFERKKQGCNKRAARKAPAPVTPPAPVQNKNKPNKKARVLSKKEERLKKHIKKLQKRALQFQGKVGLPKARRPWESDMRPEAEGDSEGEESEYFPTEEEEEEEDDEVEGAEADLSGDGTDYELKPLPKGGKRQKKVPVQEIDDDFFPSSGEEAEAASVGEGGGGGRKVGRYRDDGDEDYYKQRLRRWNKLRLQDKEKRLKLEDDSEESDAEFDEGFKVPGFLFKKLFKYQQTGVRWLWELHCQQAGGILGDEMGLGKTIQIIAFLAGLSYSKIRTRGSNYRFEGLGPTVIVCPTTVMHQWVKEFHTWWPPFRVAILHETGSYTHKKEKLIRDVAHCHGILITSYSYIRLMQDDISRYDWHYVILDEGHKIRNPNAAVTLACKQFRTPHRIILSGSPMQNNLRELWSLFDFIFPGKLGTLPVFMEQFSVPITMGGYSNASPVQVKTAYKCACVLRDTINPYLLRRMKSDVKMSLSLPDKNEQVLFCRLTDEQHKVYQNFVDSKEVYRILNGEMQIFSGLIALRKICNHPDLFSGGPKNLKGLPDDELEEDQFGYWKRSGKMIVVESLLKIWHKQGQRVLLFSQSRQMLDILEVFLRAQKYTYLKMDGTTTIASRQPLITRYNEDTSIFVFLLTTRVGGLGVNLTGANRVVIYDPDWNPSTDTQARERAWRIGQKKQVTVYRLLTAGTIEEKIYHRQIFKQFLTNRVLKDPKQRRFFKSNDLYELFTLTSPDASQSTETSAIFAGTGSDVQTPKCHLKRRIQPAFGADHDVPKRKKFPASNISVNDATSSEEKSEAKGAEVNAVTSNRSDPLKDDPHMSSNVTSNDRLGEETNAVSGPEELSVISGNGECSNSSGTGKTSMPSGDESIDEKLGLSYKRERPSQAQTEAFWENKQMENNFYKHKSKTKHHSVAEEETLEKHLRPKQKPKNSKHCRDAKFEGTRIPHLVKKRRYQKQDSENKSEAKEQSNDDYVLEKLFKKSVGVHSVMKHDAIMDGASPDYVLVEAEANRVAQDALKALRLSRQRCLGAVSGVPTWTGHRGISGAPAGKKSRFGKKRNSNFSVQHPSSTSPTEKCQDGIMKKEGKDNVPEHFSGRAEDADSSSGPLASSSLLAKMRARNHLILPERLESESGHLQEASALLPTTEHDDLLVEMRNFIAFQAHTDGQASTREILQEFESKLSASQSCVFRELLRNLCTFHRTSGGEGIWKLKPEYCXTTLLPKLSSPFF

SEQ ID NO: 274 - protein, 618 aa, Homo Sapiens
  misc_feature (596)..(596): Xaa can be any naturally occurring amino acid
MTMTLHTKASGMALLHQIQGNELEPLNRPQLKIPLERPLGEVYLDSSKPAVYNYPEGAAYEFNAAAAANAQVYGQTGLPYGPGSEAAAFGSNGLGGFPPLNSVSPSPLMLLHPPPQLSPFLQPHGQQVPYYLENEPSGYTVREAGPPAFYRPNSDNRRQGGRERLASTNDKGSMAMESAKETRYCAVCNDYASGYHYGVWSCEGCKAFFKRSIQGHNDYMCPATNQCTIDKNRRKSCQACRLRKCYEVGMMKGGIRKDRRGGRMLKHKRQRDDGEGRGEVGSAGDMRAANLWPSPLMIKRSKKNSLALSLTADQMVSALLDAEPPILYSEYDPTRPFSEASMMGLLTNLADRELVHMINWAKRVPGFVDLTLHDQVHLLECAWLEILMIGLVWRSMEHPGKLLFAPNLLLDRNQGKCVEGMVEIFDMLLATSSRFRMMNLQGEEFVCLKSIILLNSGVYTFLSSTLKSLEEKDHIHRVLDKITDTLIHLMAKAGLTLQQQHQRLAQLLLILSHIRHMSNKGMEHLYSMKCKNVVPLYDLLLEMLDAHRLHAPTSRGGASVEETDQSHLATAGSTSSHSLQKYYITGEAEGFPATVXELPGSHTVQIIPAAFYPHHAPL

SEQ ID NO: 275 - protein, 509 aa, Homo Sapiens
  misc_feature (496)..(496): Xaa can be any naturally occurring amino acid
MDIKNSPSSLNSPSSYNCSQSILPLEHGSIYIPSSYVDSHHEYPAMTFYSPAVMNYSIPSNVTNLEGGPGRQTTSPNVLWPTPGHLSPLVVHRQLSHLYAEPQKSPWCEARSLEHTLPVNRETLKRKVSGNRCASPVTGPGSKRDAHFCAVCSDYASGYHYGVWSCEGCKAFFKRSIQGHNDYICPATNQCTIDKNRRKSCQACRLRKCYEVGMVKCGSRRERCGYRLVRRQRSADEQLHCAGKAKRSGGHAPRVRELLLDALSPEQLVLTLLEAEPPHVLISRPSAPFTEASMMMSLTKLADKELVHMISWAKKIPGFVELSLFDQVRLLESCWMEVLMMGLMWRSIDHPGKLIFAPDLVLDRDEGKCVEGILEIFDMLLATTSRFRELKLQHKEYLCVKAMILLNSSMYPLVTATQDADSSRKLAHLLNAVTDALVWVIAKSGISSQQQSMRLANLLMLLSHVRHARAEKASQTLTSFGMKMETLLPEATMEQXPSNQLGGLKKNLG

SEQ ID NO: 276 - protein, 536 aa, Homo Sapiens
  misc_feature (531)..(531): Xaa can be any naturally occurring amino acid
MDIKNSPSSLNSPSSYNCSQSILPLEHGSIYIPSSYVDSHHEYPAMTFYSPAVMNYSIPSNVTNLEGGPGRQTTSPNVLWPTPGHLSPLVVHRQLSHLYAEPQKSPWCEARSLEHTLPVNRETLKRKVSGNRCASPVTGPGSKRDAHFCAVCSDYASGYHYGVWSCEGCKAFFKRSIQGHNDYICPATNQCTIDKNRRKSCQACRLRKCYEVGMVKCGSRRERCGYRLVRRQRSADEQLHCAGKAKRSGGHAPRVRELLLDALSPEQLVLTLLEAEPPHVLISRPSAPFTEASMMMSLTKLADKELVHMISWAKKIPGFVELSLFDQVRLLESCWMEVLMMGLMWRSIDHPGKLIFAPDLVLDRDEGKCVEGILEIFDMLLATTSRFRELKLQHKEYLCVKAMILLNSSMYPLVTATQDADSSRKLAHLLNAVTDALVWVIAKSGISSQQQSMRLANLLMLLSHVRHASNKGMEHLLNMKCKNVVPVYDLLLEMLNAHVLRGCKSSITGSECSPAEDSKSKEGSQNPQSQXRLALR

SEQ ID NO: 277 - protein, 542 aa, Homo Sapiens
  misc_feature (511)..(511): Xaa can be any naturally occurring amino acid
MDGFYDQQVPFMVPGKSRSEECRGRPVIDRKRKFLDTDLAHDSEELFQDLSQLQEAWLAEAQVPDDEQFVPDFQSDNLVLHAPPPTKIKRELHSPSSELSSCSHEQALGANYGEKCLYNYCAYDRKPPSGFKPLTPPTTPLSPTHQNPLFPPPQATLPTSGHAPAAGPVQGVGPAPAPHSLPEPGPQQQTFAVPRPPHQPLQMPKMMPENQYPSEQRFQRQLSEPCHPFPPQPGVPGDNRPSYHRQMSEPIVPAAPPPPQGFKQEYHDPLYEHGVPGMPGPPAHGFQSPMGIKQEPRDYCVDSEVPNCQSSYMRGGYFSSSHEGFSYEKDPRLYFDDTCVVPERLEGKVKQEPTMYREGPPYQRRGSLQLWQFLVTLLDDPANAHFIAWTGRGMEFKLIEPEEVARRWGIQKNRPAMNYDKLSRSLRYYYEKGIMQKVAGERYVYKFVCDPDALFSMAFPDNQRPFLKAESECHLSEEDTLPLTHFEDSPAYLLDMDRCSSLPYAEGFAYXVSEWRSGQTLELAVPIQANKGSGFVCVFGCS

SEQ ID NO: 278 - protein, 787 aa, Homo Sapiens
  misc_feature (747)..(747): Xaa can be any naturally occurring amino acid
MQAKKRYFILLSAGSCLALLFYFGGLQFRASRSHSRREEHSGRNGLHHPSPDHFWPRFPDALRPFVPWDQLENEDSSVHISPRQKRDANSSIYKGKKCRMESCFDFTLCKKNGFKVYVYPQQKGEKIAESYQNILAAIEGSRFYTSDPSQACLFVLSLDTLDRDQLSPQYVHNLRSKVQSLHLWNNGRNHLIFNLYSGTWPDYTEDVGFDIGQAMLAKASISTENFRPNFDVSIPLFSKDHPRTGGERGFLKFNTIPPLRKYMLVFKGKRYLTGIGSDTRNALYHVHNGEDVVLLTTCKHGKDWQKHKDSRCDRDNTEYEKYDYREMLHNATFCLVPRGRRLGSFRFLEALQAACVPVMLSNGWELPFSEVINWNQAAVIGDERLLLQIPSTIRSIHQDKILALRQQTQFLWEAYFSSVEKIVLTTLEIIQDRIFKHISRNSLIWNKHPGGLFVLPQYSSYLGDFPYYYANLGLKPPSKFTAVIHAVTPLVSQSQPVLKLLVAAAKSQYCAQIIVLWNCDKPLPAKHRWPATAVPVVVIEGESKVMSSRFLPYDNIITDAVLSLDEDTVLSTTEVDFAFTVWQSFPERIVGYPARSHFWDNSKERWGYTSKWTNDYSMVLTGAAIYHKYYHYLYSHYLPASLKNMVDQLANCEDILMNFLVSAVTKLPPIKVTQKKQYKETMMGQTSRASRWADPDHFAQRQSCMNTFASWFGYMPLIHSQMRLDPVLFKDQVSILRKKYRDIERLXGIRLSGGGEARRDGGQAALSSQCRSTHQQSQIVPTIQKLR

SEQ ID NO: 279 - protein, 166 aa, Homo Sapiens
  misc_feature (133)..(133): Xaa can be any naturally occurring amino acid
MAFDSTWKVDRSENYDKFMEKMGVNIVKRKLAAHDNLKLTITQEGNKFTVKESSAFRNIEVVFELGVTFNYNLADGTELRGTWSLEGNKLIGKFKRTDNGNELNTVREIIGDELVQTYVYEGVEAKRIFKKDXALFLAHSPKYKLDRRSILYQNYLFHPIKYKVTD

SEQ ID NO: 280 - protein, 137 aa, Homo Sapiens
  misc_feature (133)..(133): Xaa can be any naturally occurring amino acid
MCDAFVGTWKLVSSENFDDYMKEVGVGFATRKVAGMAKPNMIISVNGDVITIKSESTFKNTEISFILGQEFDEVTADDRKVKSTITLDGGVLVHVQKWDGKSTTIKRKREDDKLVVECVMKGVTSTRVYERAXAKGR

SEQ ID NO: 281 - protein, 191 aa, Homo Sapiens
  misc_feature (136)..(136): Xaa can be any naturally occurring amino acid
MATVQQLEGRWRLVDSKGFDEYMKELGVGIALRKMGAMAKPDCIITCDGKNLTIKTESTLKTTQFSCTLGEKFEETTADGRKTQTVCNFTDGALVQHQEWDGKESTITRKLKDGKLVVECVMNNVTCTRIYEKVEXKFHHHFGQELIKRMTKLSSMSKSPYCFFLFFFITVFNYLYHKHFTCSYFKVCWIN

SEQ ID NO: 282 - protein, 246 aa, Homo Sapiens
  misc_feature (209)..(209): Xaa can be any naturally occurring amino acid
MDPFLVLLHSVSSSLSSSELTELKFLCLGRVGKRKLERVQSGLDLFSMLLEQNDLEPGHTELLRELLASLRRHDLLRRVDDFEAGAAAGAAPGEEDLCAAFNVICDNVGKDWRRLARQLKVSDTKIDSIEDRYPRNLTERVRESLRIWKNTEKENATVAHLVGALRSCQMNLVADLVQEVQQARDLQNRSGAMSPMSWNSDASTSEASXWAAALRWWTTGIYTAWTLVLSRKVAQHCEDPAGSQAE

SEQ ID NO: 283 - protein, 934 aa, Homo Sapiens
  misc_feature (929)..(929): Xaa can be any naturally occurring amino acid
MGGSASSQLDEGKCAYIRGKTEAAIKNFSPYYSRQYSVAFCNHVRTEVEQQRDLTSQFLKTKPPLAPGTILYEAELSQFSEDIKKWKERYVVVKNDYAVESYENKEAYQRGAAPKCRILPAGGKVLTSEDEYNLLSDRHFPDPLASSEKENTQPFVVLPKEFPVYLWQPFFRHGYFCFHEAADQKRFSALLSDCVRHLNHDYMKQMTFEAQAFLEAVQFFRQEKGHYGSWEMITGDEIQILSNLVMEELLPTLQTDLLPKMKGKKNDRKRTWLGLLEEAYTLVQHQVSEGLSALKEECRALTKGLEGTIRSDMDQIVNSKNYLIGKIKAMVAQPAEKSCLESVQPFLASILEELMGPVSSGFSEVRVLFEKEVNEVSQNFQTTKDSVQLKEHLDRLMNLPLHSVKMEPCYTKVNLLHERLQDLKSRFRFPHIDLVVQRTQNYMQELMENAVFTFEQLLSPHLQGEASKTAVAIEKVKLRVLKQYDYDSSTIRKKIFQEALVQITLPTVQKALASTCKPELQKYEQFIFADHTNMIHVENVYEEILHQILLDETLKVIKEAAILKKHNLFEDNMALPSESVSSLTDLKPPTGSNQASPARRASAILPGVLGSETLSNEVFQESEEEKQPEVPSSLAKGESLSLPGPSPPPDGTEQVIISRVDDPVVNPVATEDTAGLPGTCSSELEFGGTLEDEEPAQEEPEPITASGSLKALRKLLTASVEVPVDSAPVMEEDTNGESHVPQENEEEEEKEPSQAAAIHPDNCEESEVSEREAQPPCPEAHGEELGGFPEVGSPASPPASGGLTEEPLGPMEGELPGEACTLTAHEGRGGKCTEEGDASQQEGCTLGSDPICLSESQVSEEQEEMGGQSSAAQATASVNAEEIKVARIHECQWVVEDAPNPDVLLSHKDDVKEGEGGQESFPELPSEEXKGQFG

SEQ ID NO: 284 - protein, 776 aa, Homo Sapiens
  misc_feature (761)..(761): Xaa can be any naturally occurring amino acid
MKTWVKIVFGVATSAVLALLVMCIVLRPSRVHNSEENTMRALTLKDILNGTFSYKTFFPNWISGQEYLHQSADNNIVLYNIETGQSYTILSNRTMKSVNASNYGLSPDRQFVYLESDYSKLWRYSYTATYYIYDLSNGEFVRGNELPRPIQYLCWSPVGSKLAYVYQNNIYLKQRPGDPPFQITFNGRENKIFNGIPDWVYEEEMLATKYALWWSPNGKFLAYAEFNDTDIPVIAYSYYGDEQYPRTINIPYPKAGAKNPVVRIFIIDTTYPAYVGPQEVPVPAMIASSDYYFSWLTWVTDERVCLQWLKRVQNVSVLSICDFREDWQTWDCPKTQEHIEESRTGWAGGFFVSTPVFSYDAISYYKIFSDKDGYKHIHYIKDTVENAIQITSGKWEAINIFRVTQDSLFYSSNEFEEYPGRRNIYRISIGSYPPSKKCVTCHLRKERCQYYTASFSDYAKYYALVCYGPGIPISTLHDGRTDQEIKILEENKELENALKNIQLPKEEIKKLEVDEITLWYKMILPPQFDRSKKYPLLIQVYGGPCSQSVRSVFAVNWISYLASKEGMVIALVDGRGTAFQGDKLLYAVYRKLGVYEVEDQITAVRKFIEMGFIDEKRIAIWGWSYGGYVSSLALASGTGLFKCGIAVAPVSSWEYYASVYTERFMGLPTKDDNLEHYKNSTVMARAEYFRNVDYLLIHGTADDNVHFQNSAQIAKALVNAQVDFQAMWYSDQNHGLSGLSTNHLYTHMTHFLKQCFSLSDXKRCRCKPVSESENLI

SEQ ID NO: 285 - protein, 311 aa, Homo Sapiens
  misc_feature (294)..(294): Xaa can be any naturally occurring amino acid
MDAPHSKAALDSINELPENILLELFTHVPARQLLLNCRLVCSLWRDLIDLMTLWKRKCLREGFITKDWDQPVADWKIFYFLRSLHRNLLRNPCAEEDMFAWQIDFNGGDRWKVESLPGAHGTDFPDPKVKKYFVTSYEMCLKSQLVDLVAEGYWEELLDTFRPDIVVKDWFAARADCGCTYQLKVQLASADYFVLASFEPPPVTIQQWNNATWTEVSYTFSDYPRGVRYILFQHGGRDTQYWAGWYGPRVTNSSIVVSPKMTRNQASSEAQPGQKHGQEEAAQSPYRAVVQIFXQLSILCLGQPEVPPGRS

SEQ ID NO: 286 - protein, 420 aa, Homo Sapiens
  misc_feature (381)..(381): Xaa can be any naturally occurring amino acid
MGIQGLAKLIADVAPSAIRENDIKSYFGRKVAIDASMSIYQFLIAVRQGGDVLQNEEGETTSHLMGMFYRTIRMMENGIKPVYVFDGKPPQLKSGELAKRSERRAEAEKQLQQAQAAGAEQEVEKFTKRLVKVTKQHNDECKHLLSLMGIPYLDAPSEAEASCAALVKAGKVYAAATEDMDCLTFGSPVLMRHLTASEAKKLPIQEFHLSRILQELGLNQEQFVDLCILLGSDYCESIRGIGPKRAVDLIQKHKSIEEIVRRLDPNKYPVPENWLHKEAHQLFLEPEVLDPESVELKWSEPNEEELIKFMCGEKQFSEERIRSGVKRLSKSRQGSTQGRLDDFFKVTGSLSSAKRKEPEPKGSTKKKAKTGAAGKFKRGKXMCFPIIPPSPQNICRLVPLRATARETFTGWREDSKAFLA

SEQ ID NO: 287 - protein, 187 aa, Homo Sapiens
  misc_feature (156)..(156): Xaa can be any naturally occurring amino acid
MAEGEITTFTALTEKFNLPPGNYKKPKLLYCSNGGHFLRILPDGTVDGTRDRSDQHIQLQLSAESVGEVYIKSTETGQYLAMDTDGLLYGSQTPNEECLFLERLEENHYNTYISKKHAEKNWFVGLKKNGSCKRGPRTHYGQKAILFLPLPVSSDXRDLFWVLTTPEKFRGVLTWLTQKCSLDHWLR

SEQ ID NO: 288 - protein, 351 aa, Homo Sapiens
  misc_feature (217)..(217): Xaa can be any naturally occurring amino acid
MGAARLLPNLTLCLQLLILCCQTQGENHPSPNFNQYVRDQGAMTDQLSRRQIREYQLYSRTSGKHVQVTGRRISATAEDGNKFAKLIVETDTFGSRVRIKGAESEKYICMNKRGKLIGKPSGKSKDCVFTEIVLENNYTAFQNARHEGWFMAFTRQGRPRQASRSRQNQREAHFIKRLYQGQLPFPNHAEKQKQFEFVGSAPTRRTKRTRRPQPLTXSGRQGAAAPGPPPHPFPFLIQGLGWGGGRGARSPREDPEGREASEPPAGKGQAGAPGAAGTVPPSRTGGRPWRGTECHPDLRPPASAGLPAGLLKPAERSATEGLADNRLEVAVLKICFSDLPQSAPSPQTPPG

SEQ ID NO: 289 - protein, 262 aa, Homo Sapiens
  misc_feature (208)..(208): Xaa can be any naturally occurring amino acid
MYSAPSACTCLCLHFLLLCFQVQVLVAEENVDFRIHVENQTRARDDVSRKQLRLYQLYSRTSGKHIQVLGRRISARGEDGDKYAQLLVETDTFGSQVRIKGKETEFYLCMNRKGKLVGKPDGTSKECVFIEKVLENNYTALMSAKYSGWYVGFTKKGRPRKGPKTRENQQDVHFMKRYPKGQPELQKPFKYTTVTKRSRRIRPTHPAXATPPRPLRSPWPHSHSQKTASEEYFYMKNKEEALFLYIVFKRRQKLNQNSWGEG

SEQ ID NO: 290 - protein, 245 aa, Homo Sapiens
  misc_feature (217)..(217): Xaa can be any naturally occurring amino acid
MRSGCVVVHVWILAGLWLAVAGRPLAFSDAGPHVHYGWGDPIRLRHLYTSGPHGLSSCFLRIRADGVVDCARGQSAHSLLEIKAVALRTVAIKGVHSVRYLCMGADGKMQGLLQYSEEDCAFEEEIRPDGYNVYRSEKHRLPVSLSSAKQRQLYKNRGFLPLSHFLPMLPMVPEEPEDLRGHLESDMFSSPLETDSMDPFGLVTGLEAVRSPSFEKXLRPCPGLFTAARGCGTCSVGDVLLQEQS

SEQ ID NO: 291 - protein, 283 aa, Homo Sapiens
  misc_feature (252)..(252): Xaa can be any naturally occurring amino acid
MLGARLRLWVCALCSVCSMSVLRAYPNASPLLGSSWGGLIHLYTATARNSYHLQIHKNGHVDGAPHQTIYSALMIRSEDAGFVVITGVMSRRYLCMDFRGNIFGSHYFDPENCRFQHQTLENGYDVYHSPQYHFLVSLGRAKRAFLPGMNPPPYSQFLSRRNEIPLIHFNTPIPRRHTRSAEDDSERDPLNVLKPRARMTPAPASCSQELPSAEDNSPMASDPLGVVRGGRVNTHAGGTGPEGCRPFAKFIXGRWKGTLFNPSLSKRSSSQGPGPLTFRGWER

SEQ ID NO: 292 - protein, 265 aa, Homo Sapiens
  misc_feature (240)..(240): Xaa can be any naturally occurring amino acid
MGLIWLLLLSLLEPGWPAAGPGARLRRDAGGRGGVYEHLGGAPRRRKLYCATKYHLQLHPSGRVNGSLENSAYSILEITAVEVGIVAIRGLFSGRYLAMNKRGRLYASEHYSAECEFVERIHELGYNTYASRLYRTVSSTPGARRQPSAERLWYVSVNGKGRPRRGFKTRRTQKSSLFLPRVLDHRDHEMVRQLQSGLPRPPGKGVQPRRRRQKQSPDNLEPSHVQASRLGSQLEASAHXLGLVATARAPGDILAWQPLDSDSPP

SEQ ID NO: 293 - protein, 234 aa, Homo Sapiens
  misc_feature (207)..(207): Xaa can be any naturally occurring amino acid
MSGPGTAAVALLPAVLLALLAPWAGRGGAAAPTAPNGTLEAELERRWESLVALSLARLPVAAQPKEAAVQSGAGDYLLGIKRLRRLYCNVGIGFHLQALPDGRIGGAHADTRDSLLELSPVERGVVSIFGVASRFFVAMSSKGKLYGSPFFTDECTFKEILLPNNYNAYESYKYPGMFIALSKNGKTKKGNRVSPTMKVTHFLPRLXPSRGPLPQPREAPGRAVRGSPWCTFFG

SEQ ID NO: 294 - protein, 218 aa, Homo Sapiens
  misc_feature (209)..(209): Xaa can be any naturally occurring amino acid
MALGQKLFITMSRGAGRLQGTLWALVFLGILVGMVVPSPAGTRANNTLLDSRGWGTLLSRSRAGLAGEIAGVNWESGYLVGIKRQRRLYCNVGIGFHLQVLPDGRISGTHEENPYSLLEISTVERGVVSLFGVRSALFVAMNSKGRLYATPSFQEECKFRETLLPNNYNAYESDLYQGTYIALSKYGRVKRGSKVSPIMTVTHFLPRIXGPTKEGLQI

SEQ ID NO: 295 - protein, 239 aa, Homo Sapiens
  misc_feature (195)..(195): Xaa can be any naturally occurring amino acid
MHKWILTWILPTLLYRSCFHIICLVGTISLACNDMTPEQMATNVNCSSPERHTRSYDYMEGGDIRVRRLFCRTQWYLRIDKRGKVKGTQEMKNNYNIMEIRTVAVGIVAIKGVESEFYLAMNKEGKLYAKKECNEDCNFKELILENHYNTYASAKWTHNGGEMFVALNQKGIPVRGKKTKKEQKTAHFLPMAITXLHMVYKEPSSSREISLSGLFSFFSKFSFLLFFSNQERLEKLLKN

SEQ ID NO: 296 - protein, 241 aa, Homo Sapiens
  misc_feature (216)..(216): Xaa can be any naturally occurring amino acid
MGSPRSALSCLLLHLLVLCLQAQVTVQSSPNFTQHVREQSLVTDQLSRRLIRTYQLYSRTSGKHVQVLANKRINAMAEDGDPFAKLIVETDTFGSRVRVRGAETGLYICMNKKGKLIAKSNGKGKDCVFTEIVLENNYTALQNAKYEGWYMAFTRKGRPRKGSKTRQHQREVHFMKRLPRGHHTTEQSLRFEFLNYPPFTRSLRGSQRTWAPEPRXVLPGPPHNARPQRGSSCRAPKTQAR

SEQ ID NO: 297 - protein, 270 aa, Homo Sapiens
  misc_feature (245)..(245): Xaa can be any naturally occurring amino acid
MGSPRSALSCLLLHLLVLCLQAQEGPGRGPALGRELASLFRAGREPQGVSQQVTVQSSPNFTQHVREQSLVTDQLSRRLIRTYQLYSRTSGKHVQVLANKRINAMAEDGDPFAKLIVETDTFGSRVRVRGAETGLYICMNKKGKLIAKSNGKGKDCVFTEIVLENNYTALQNAKYEGWYMAFTRKGRPRKGSKTRQHQREVHFMKRLPRGHHTTEQSLRFEFLNYPPFTRSLRGSQRTWAPEPRXVLPGPPHNARPQRGSSCRAPKTQAR

SEQ ID NO: 298 - protein, 259 aa, Homo Sapiens
  misc_feature (234)..(234): Xaa can be any naturally occurring amino acid
MGSPRSALSCLLLHLLVLCLQAQEGPGRGPALGRELASLFRAGREPQGVSQQHVREQSLVTDQLSRRLIRTYQLYSRTSGKHVQVLANKRINAMAEDGDPFAKLIVETDTFGSRVRVRGAETGLYICMNKKGKLIAKSNGKGKDCVFTEIVLENNYTALQNAKYEGWYMAFTRKGRPRKGSKTRQHQREVHFMKRLPRGHHTTEQSLRFEFLNYPPFTRSLRGSQRTWAPEPRXVLPGPPHNARPQRGSSCRAPKTQAR

SEQ ID NO: 299 - protein, 230 aa, Homo Sapiens
  misc_feature (205)..(205): Xaa can be any naturally occurring amino acid
MGSPRSALSCLLLHLLVLCLQAQHVREQSLVTDQLSRRLIRTYQLYSRTSGKHVQVLANKRINAMAEDGDPFAKLIVETDTFGSRVRVRGAETGLYICMNKKGKLIAKSNGKGKDCVFTEIVLENNYTALQNAKYEGWYMAFTRKGRPRKGSKTRQHQREVHFMKRLPRGHHTTEQSLRFEFLNYPPFTRSLRGSQRTWAPEPRXVLPGPPHNARPQRGSSCRAPKTQAR

SEQ ID NO: 300 - protein, 218 aa, Homo Sapiens
  misc_feature (209)..(209): Xaa can be any naturally occurring amino acid
MAPLGEVGNYFGVQDAVPFGNVPVLPVDSPVLLSDHLGQSEAGGLPRGPAVTDLDHLKGILRRRQLYCRTGFHLEIFPNGTIQGTRKDHSRFGILEFISIAVGLVSIRGVDSGLYLGMNEKGELYGSEKLTQECVFREQFEENWYNTYSSNLYKHVDTGRRYYVALNKDGTPREGTRTKRHQKFTHFLPRPVDPDKVPELYKDILSQSXQRQFLHLSP

SEQ ID NO: 301 - protein, 925 aa, Homo Sapiens
  misc_feature (821)..(821): Xaa can be any naturally occurring amino acid
MWSWKCLLFWAVLVTATLCTARPSPTLPEQAQPWGAPVEVESFLVHPGDLLQLRCRLRDDVQSINWLRDGVQLAESNRTRITGEEVEVQDSVPADSGLYACVTSSPSGSDTTYFSVNVSDALPSSEDDDDDDDSSSEEKETDNTKPNPVAPYWTSPEKMEKKLHAVPAAKTVKFKCPSSGTPNPTLRWLKNGKEFKPDHRIGGYKVRYATWSIIMDSVVPSDKGNYTCIVENEYGSINHTYQLDVVERSPHRPILQAGLPANKTVALGSNVEFMCKVYSDPQPHIQWLKHIEVNGSKIGPDNLPYVQILKTAGVNTTDKEMEVLHLRNVSFEDAGEYTCLAGNSIGLSHHSAWLTVLEALEERPAVMTSPLYLEIIIYCTGAFLISCMVGSVIVYKMKSGTKKSDFHSQMAVHKLAKSIPLRRQVTVSADSSASMNSGVLLVRPSRLSSSGTPMLAGVSEYELPEDPRWELPRDRLVLGKPLGEGCFGQVVLAEAIGLDKDKPNRVTKVAVKMLKSDATEKDLSDLISEMEMMKMIGKHKNIINLLGACTQDGPLYVIVEYASKGNLREYLQARRPPGLEYCYNPSHNPEEQLSSKDLVSCAYQVARGMEYLASKKCIHRDLAARNVLVTEDNVMKIADFGLARDIHHIDYYKKTTNGRLPVKWMAPEALFDRIYTHQSDVWSFGVLLWEIFTLGGSPYPGVPVEELFKLLKEGHRMDKPSNCTNELYMMMRDCWHAVPSQRPTFKQLVEDLDRIVALTSNQEYLDLSMPLDQYSPSFPDTRSSTCSSGEDSVFSHEPLPEEPCLPRHPAQLANGGLKRRXLPPTRPPQTPPSAVTLTHSPCWAHHLSVPVPFPAGRSRLPTRGLPVWPAFTPLSSPLPPPPLHLLVRGAKRQIFAASHFIPSQMLDQHPSLPPGTAWRAGSGSQ

SEQ ID NO: 302 - protein, 838 aa, Homo Sapiens
  misc_feature (734)..(734): Xaa can be any naturally occurring amino acid
MWSWKCLLFWAVLVTATLCTARPSPTLPEQDALPSSEDDDDDDDSSSEEKETDNTKPNRMPVAPYWTSPEKMEKKLHAVPAAKTVKFKCPSSGTPNPTLRWLKNGKEFKPDHRIGGYKVRYATWSIIMDSVVPSDKGNYTCIVENEYGSINHTYQLDVVERSPHRPILQAGLPANKTVALGSNVEFMCKVYSDPQPHIQWLKHIEVNGSKIGPDNLPYVQILKTAGVNTTDKEMEVLHLRNVSFEDAGEYTCLAGNSIGLSHHSAWLTVLEALEERPAVMTSPLYLEIIIYCTGAFLISCMVGSVIVYKMKSGTKKSDFHSQMAVHKLAKSIPLRRQVTVSADSSASMNSGVLLVRPSRLSSSGTPMLAGVSEYELPEDPRWELPRDRLVLGKPLGEGCFGQVVLAEAIGLDKDKPNRVTKVAVKMLKSDATEKDLSDLISEMEMMKMIGKHKNIINLLGACTQDGPLYVIVEYASKGNLREYLQARRPPGLEYCYNPSHNPEEQLSSKDLVSCAYQVARGMEYLASKKCIHRDLAARNVLVTEDNVMKIADFGLARDIHHIDYYKKTTNGRLPVKWMAPEALFDRIYTHQSDVWSFGVLLWEIFTLGGSPYPGVPVEELFKLLKEGHRMDKPSNCTNELYMMMRDCWHAVPSQRPTFKQLVEDLDRIVALTSNQEYLDLSMPLDQYSPSFPDTRSSTCSSGEDSVFSHEPLPEEPCLPRHPAQLANGGLKRRXLPPTRPPQTPPSAVTLTHSPCWAHHLSVPVPFPAGRSRLPTRGLPVWPAFTPLSSPLPPPPLHLLVRGAKRQIFAASHFIPSQMLDQHPSLPPGTAWRAGSGSQ

SEQ ID NO: 303 - protein, 836 aa, Homo Sapiens
  misc_feature (732)..(732): Xaa can be any naturally occurring amino acid
MWSWKCLLFWAVLVTATLCTARPSPTLPEQDALPSSEDDDDDDDSSSEEKETDNTKPNPVAPYWTSPEKMEKKLHAVPAAKTVKFKCPSSGTPNPTLRWLKNGKEFKPDHRIGGYKVRYATWSIIMDSVVPSDKGNYTCIVENEYGSINHTYQLDVVERSPHRPILQAGLPANKTVALGSNVEFMCKVYSDPQPHIQWLKHIEVNGSKIGPDNLPYVQILKTAGVNTTDKEMEVLHLRNVSFEDAGEYTCLAGNSIGLSHHSAWLTVLEALEERPAVMTSPLYLEIIIYCTGAFLISCMVGSVIVYKMKSGTKKSDFHSQMAVHKLAKSIPLRRQVTVSADSSASMNSGVLLVRPSRLSSSGTPMLAGVSEYELPEDPRWELPRDRLVLGKPLGEGCFGQVVLAEAIGLDKDKPNRVTKVAVKMLKSDATEKDLSDLISEMEMMKMIGKHKNIINLLGACTQDGPLYVIVEYASKGNLREYLQARRPPGLEYCYNPSHNPEEQLSSKDLVSCAYQVARGMEYLASKKCIHRDLAARNVLVTEDNVMKIADFGLARDIHHIDYYKKTTNGRLPVKWMAPEALFDRIYTHQSDVWSFGVLLWEIFTLGGSPYPGVPVEELFKLLKEGHRMDKPSNCTNELYMMMRDCWHAVPSQRPTFKQLVEDLDRIVALTSNQEYLDLSMPLDQYSPSFPDTRSSTCSSGEDSVFSHEPLPEEPCLPRHPAQLANGGLKRRXLPPTRPPQTPPSAVTLTHSPCWAHHLSVPVPFPAGRSRLPTRGLPVWPAFTPLSSPLPPPPLHLLVRGAKRQIFAASHFIPSQMLDQHPSLPPGTAWRAGSGSQ

SEQ ID NO: 304 - protein, 927 aa, Homo Sapiens
  misc_feature (823)..(823): Xaa can be any naturally occurring amino acid
MWSWKCLLFWAVLVTATLCTARPSPTLPEQAQPWGAPVEVESFLVHPGDLLQLRCRLRDDVQSINWLRDGVQLAESNRTRITGEEVEVQDSVPADSGLYACVTSSPSGSDTTYFSVNVSDALPSSEDDDDDDDSSSEEKETDNTKPNRMPVAPYWTSPEKMEKKLHAVPAAKTVKFKCPSSGTPNPTLRWLKNGKEFKPDHRIGGYKVRYATWSIIMDSVVPSDKGNYTCIVENEYGSINHTYQLDVVERSPHRPILQAGLPANKTVALGSNVEFMCKVYSDPQPHIQWLKHIEVNGSKIGPDNLPYVQILKTAGVNTTDKEMEVLHLRNVSFEDAGEYTCLAGNSIGLSHHSAWLTVLEALEERPAVMTSPLYLEIIIYCTGAFLISCMVGSVIVYKMKSGTKKSDFHSQMAVHKLAKSIPLRRQVTVSADSSASMNSGVLLVRPSRLSSSGTPMLAGVSEYELPEDPRWELPRDRLVLGKPLGEGCFGQVVLAEAIGLDKDKPNRVTKVAVKMLKSDATEKDLSDLISEMEMMKMIGKHKNIINLLGACTQDGPLYVIVEYASKGNLREYLQARRPPGLEYCYNPSHNPEEQLSSKDLVSCAYQVARGMEYLASKKCIHRDLAARNVLVTEDNVMKIADFGLARDIHHIDYYKKTTNGRLPVKWMAPEALFDRIYTHQSDVWSFGVLLWEIFTLGGSPYPGVPVEELFKLLKEGHRMDKPSNCTNELYMMMRDCWHAVPSQRPTFKQLVEDLDRIVALTSNQEYLDLSMPLDQYSPSFPDTRSSTCSSGEDSVFSHEPLPEEPCLPRHPAQLANGGLKRRXLPPTRPPQTPPSAVTLTHSPCWAHHLSVPVPFPAGRSRLPTRGLPVWPAFTPLSSPLPPPPLHLLVRGAKRQIFAASHFIPSQMLDQHPSLPPGTAWRAGSGSQ

SEQ ID NO: 305 - protein, 862 aa, Homo Sapiens
  misc_feature (822)..(822): Xaa can be any naturally occurring amino acid
MVSWGRFICLVVVTMATLSLARPSFSLVEDTTLEPEEPPTKYQISQPEVYVAAPGESLEVRCLLKDAAVISWTKDGVHLGPNNRTVLIGEYLQIKGATPRDSGLYACTASRTVDSETWYFMVNVTDAISSGDDEDDTDGAEDFVSENSNNKRAPYWTNTEKMEKRLHAVPAANTVKFRCPAGGNPMPTMRWLKNGKEFKQEHRIGGYKVRNQHWSLIMESVVPSDKGNYTCVVENEYGSINHTYHLDVVERSPHRPILQAGLPANASTVVGGDVEFVCKVYSDAQPHIQWIKHVEKNGSKYGPDGLPYLKVLKAAGVNTTDKEIEVLYIRNVTFEDAGEYTCLAGNSIGISFHSAWLTVLPAPGREKEITASPDYLEIAIYCIGVFLIACMVVTVILCRMKNTTKKPDFSSQPAVHKLTKRIPLRRQVTVSAESSSSMNSNTPLVRITTRLSSTADTPMLAGVSEYELPEDPKWEFPRDKLTLGKPLGEGCFGQVVMAEAVGIDKDKPKEAVTVAVKMLKDDATEKDLSDLVSEMEMMKMIGKHKNIINLLGACTQDGPLYVIVEYASKGNLREYLRARRPPGMEYSYDINRVPEEQMTFKDLVSCTYQLARGMEYLASQKCIHRDLAARNVLVTENNVMKIADFGLARDINNIDYYKKTTNGRLPVKWMAPEALFDRVYTHQSDVWSFGVLMWEIFTLGGSPYPGIPVEELFKLLKEGHRMDKPANCTNELYMMMRDCWHAVPSQRPTFKQLVEDLDRILTLTTNEEYLDLSQPLEQYSPSYPDTRSSCSSGDDSVFSPDPMPYEPCLPQYPHINGSVKTXMTVSACPQTGQHWEPSYTEQGDHASQSLLSPLVYMDQRSK

SEQ ID NO: 306 - protein, 863 aa, Homo Sapiens
  misc_feature (823)..(823): Xaa can be any naturally occurring amino acid
MVSWGRFICLVVVTMATLSLARPSFSLVEDTTLEPEEPPTKYQISQPEVYVAAPGESLEVRCLLKDAAVISWTKDGVHLGPNNRTVLIGEYLQIKGATPRDSGLYACTASRTVDSETWYFMVNVTDAISSGDDEDDTDGAEDFVSENSNNKRAPYWTNTEKMEKRLHAVPAANTVKFRCPAGGNPMPTMRWLKNGKEFKQEHRIGGYKVRNQHWSLIMESVVPSDKGNYTCVVENEYGSINHTYHLDVVERSPHRPILQAGLPANASTVVGGDVEFVCKVYSDAQPHIQWIKHVEKNGSKYGPDGLPYLKVLKHSGINSSNAEVLALFNVTEADAGEYICKVSNYIGQANQSAWLTVLPKQQAPGREKEITASPDYLEIAIYCIGVFLIACMVVTVILCRMKNTTKKPDFSSQPAVHKLTKRIPLRRQVTVSAESSSSMNSNTPLVRITTRLSSTADTPMLAGVSEYELPEDPKWEFPRDKLTLGKPLGEGCFGQVVMAEAVGIDKDKPKEAVTVAVKMLKDDATEKDLSDLVSEMEMMKMIGKHKNIINLLGACTQDGPLYVIVEYASKGNLREYLRARRPPGMEYSYDINRVPEEQMTFKDLVSCTYQLARGMEYLASQKCIHRDLAARNVLVTENNVMKIADFGLARDINNIDYYKKTTNGRLPVKWMAPEALFDRVYTHQSDVWSFGVLMWEIFTLGGSPYPGIPVEELFKLLKEGHRMDKPANCTNELYMMMRDCWHAVPSQRPTFKQLVEDLDRILTLTTNEEYLDLSQPLEQYSPSYPDTRSSCSSGDDSVFSPDPMPYEPCLPQYPHINGSVKTXMTVSACPQTGQHWEPSYTEQGDHASQSLLSPLVYMDQRSK

SEQ ID NO: 307 - protein, 946 aa, Homo Sapiens
  misc_feature (807)..(807): Xaa can be any naturally occurring amino acid
MGAPACALALCVAVAIVAGASSESLGTEQRVVGRAAEVPGPEPGQQEQLVFGSGDAVELSCPPPGGGPMGPTVWVKDGTGLVPSERVLVGPQRLQVLNASHEDSGAYSCRQRLTQRVLCHFSVRVTDAPSSGDDEDGEDEAEDTGVDTGAPYWTRPERMDKKLLAVPAANTVRFRCPAAGNPTPSISWLKNGREFRGEHRIGGIKLRHQQWSLVMESVVPSDRGNYTCVVENKFGSIRQTYTLDVLERSPHRPILQAGLPANQTAVLGSDVEFHCKVYSDAQPHIQWLKHVEVNGSKVGPDGTPYVTVLKTAGANTTDKELEVLSLHNVTFEDAGEYTCLAGNSIGFSHHSAWLVVLPAEEELVEADEAGSVYAGILSYGVGFFLFILVVAAVTLCRLRSPPKKGLGSPTVHKISRFPLKRQVSLESNASMSSNTPLVRIARLSSGEGPTLANVSELELPADPKWELSRARLTLGKPLGEGCFGQVVMAEAIGIDKDRAAKPVTVAVKMLKDDATDKDLSDLVSEMEMMKMIGKHKNIINLLGACTQGGPLYVLVEYAAKGNLREFLRARRPPGLDYSFDTCKPPEEQLTFKDLVSCAYQVARGMEYLASQKCIHRDLAARNVLVTEDNVMKIADFGLARDVHNLDYYKKTTNGRLPVKWMAPEALFDRVYTHQSDVWSFGVLLWEIFTLGGSPYPGIPVEELFKLLKEGHRMDKPANCTHDLYMIMRECWHAAPSQRPTFKQLVEDLDRVLTVTSTDEYLDLSAPFEQYSPGGQDTPSSSSSGDDSVFAHDLLPPAPPSSGGSRTXRATGPQQCEGSLAALPAAGAQPLPGMRLSADGETATQSFGLCVCVCVCVCVCTSACACVRAHLASRCRGTLGVPAAVQRSPDWCCSTEGPLFWGDPVQNVSGPTRWDPVGQGAGPDMARPLPLHHGTSQGALGPSHTQS

SEQ ID NO: 308 - protein, 834 aa, Homo Sapiens
  misc_feature (695)..(695): Xaa can be any naturally occurring amino acid
MGAPACALALCVAVAIVAGASSESLGTEQRVVGRAAEVPGPEPGQQEQLVFGSGDAVELSCPPPGGGPMGPTVWVKDGTGLVPSERVLVGPQRLQVLNASHEDSGAYSCRQRLTQRVLCHFSVRVTDAPSSGDDEDGEDEAEDTGVDTGAPYWTRPERMDKKLLAVPAANTVRFRCPAAGNPTPSISWLKNGREFRGEHRIGGIKLRHQQWSLVMESVVPSDRGNYTCVVENKFGSIRQTYTLDVLERSPHRPILQAGLPANQTAVLGSDVEFHCKVYSDAQPHIQWLKHVEVNGSKVGPDGTPYVTVLKVSLESNASMSSNTPLVRIARLSSGEGPTLANVSELELPADPKWELSRARLTLGKPLGEGCFGQVVMAEAIGIDKDRAAKPVTVAVKMLKDDATDKDLSDLVSEMEMMKMIGKHKNIINLLGACTQGGPLYVLVEYAAKGNLREFLRARRPPGLDYSFDTCKPPEEQLTFKDLVSCAYQVARGMEYLASQKCIHRDLAARNVLVTEDNVMKIADFGLARDVHNLDYYKKTTNGRLPVKWMAPEALFDRVYTHQSDVWSFGVLLWEIFTLGGSPYPGIPVEELFKLLKEGHRMDKPANCTHDLYMIMRECWHAAPSQRPTFKQLVEDLDRVLTVTSTDEYLDLSAPFEQYSPGGQDTPSSSSSGDDSVFAHDLLPPAPPSSGGSRTXRATGPQQCEGSLAALPAAGAQPLPGMRLSADGETATQSFGLCVCVCVCVCVCTSACACVRAHLASRCRGTLGVPAAVQRSPDWCCSTEGPLFWGDPVQNVSGPTRWDPVGQGAGPDMARPLPLHHGTSQGALGPSHTQS

SEQ ID NO: 309 - protein, 859 aa, Homo Sapiens
  misc_feature (803)..(803): Xaa can be any naturally occurring amino acid
MRLLLALLGVLLSVPGPPVLSLEASEEVELEPCLAPSLEQQEQELTVALGQPVRLCCGRAERGGHWYKEGSRLAPAGRVRGWRGRLEIASFLPEDAGRYLCLARGSMIVLQNLTLITGDSLTSSNDDEDPKSHRDPSNRHSYPQQAPYWTHPQRMEKKLHAVPAGNTVKFRCPAAGNPTPTIRWLKDGQAFHGENRIGGIRLRHQHWSLVMESVVPSDRGTYTCLVENAVGSIRYNYLLDVLERSPHRPILQAGLPANTTAVVGSDVELLCKVYSDAQPHIQWLKHIVINGSSFGADGFPYVQVLKTADINSSEVEVLYLRNVSAEDAGEYTCLAGNSIGLSYQSAWLTVLPEEDPTWTAAAPEARYTDIILYASGSLALAVLLLLAGLYRGQALHGRHPRPPATVQKLSRFPLARQFSLESGSSGKSSSSLVRGVRLSSSGPALLAGLVSLDLPLDPLWEFPRDRLVLGKPLGEGCFGQVVRAEAFGMDPARPDQASTVAVKMLKDNASDKDLADLVSEMEVMKLIGRHKNIINLLGVCTQEGPLYVIVECAAKGNLREFLRARRPPGPDLSPDGPRSSEGPLSFPVLVSCAYQVARGMQYLESRKCIHRDLAARNVLVTEDNVMKIADFGLARGVHHIDYYKKTSNGRLPVKWMAPEALFDRVYTHQSDVWSFGILLWEIFTLGGSPYPGIPVEELFSLLREGHRMDRPPHCPPELYGLMRECWHAAPSQRPTFKQLVEALDKVLLAVSEEYLDLRLTFGPYSPSGGDASSTCSSSDSVFSHDPLPLGSSSFPFGSGVQTXARLKAVQAHRLVALGLGAQPQPDTVLDLDSMGPLAQSCCAVSKGRALALGAAVPVS

SEQ ID NO: 310 - protein, 166 aa, Homo Sapiens
  misc_feature (148)..(148): Xaa can be any naturally occurring amino acid
MSFRFGQHLIKPSVVFLKTELSFALVNRKPVVPGHVLVCPLRPVERFHDLRPDEVADLFQTTQRVGTVVEKHFHGTSLTFSMQDGPEAGQTVKHVHVHVLPRKAGDFHRNDSIYEELQKHDKEDFPASWRSEEEMAAEAAALRVYFQXHRCFSDPEFQQKSYCQPV

SEQ ID NO: 311 - protein, 405 aa, Homo Sapiens
  misc_feature (355)..(355): Xaa can be any naturally occurring amino acid
MYREWVVVNVFMMLYVQLVQGSSNEHGPVKRSSQSTLERSEQQIRAASSLEELLRITHSEDWKLWRCRLRLKSFTSMDSRSASHRSTRFAATFYDIETLKVIDEEWQRTQCSPRETCVEVASELGKSTNTFFKPPCVNVFRCGGCCNEESLICMNTSTSYISKQLFEISVPLTSVPELVPVKVANHTGCKCLPTAPRHPYSIIRRSIQIPEEDRCSHSKKLCPIDMLWDSNKCKCVLQEENPLAGTEDHSHLQEPALCGPHMMFDEDRCECVCKTPCPKDLIQHPKNCSCFECKESLETCCQKHKLFHPDTCSCEDRCPFHTRPCASGKTACAKHCRFPKEKRAAQGPHSRKNPXFSVPSSPSLSFLTACCFAKLLSLFFSQVLKKKSILHSTTVNPDQPSIHTS

SEQ ID NO: 312 - protein, 618 aa, Homo Sapiens
  misc_feature (534)..(534): Xaa can be any naturally occurring amino acid
MTKKRIAVIGGGVSGLSSIKCCVEEGLEPVCFERTDDIGGLWRFQENPEEGRASIYKSVIINTSKEMMCFSDYPIPDHYPNFMHNAQVLEYFRMYAKEFDLLKYIRFKTTVCSVKKQPDFATSGQWEVVTESEGKKEMNVFDGVMVCTGHHTNAHLPLESFPGIEKFKGQYFHSRDYKNPEGFTGKRVIIIGIGNSGGDLAVEISQTAKQVFLSTRRGAWILNRVGDYGYPADVLFSSRLTHFIWKICGQSLANKYLEKKINQRFDHEMFGLKPKHRALSQHPTLNDDLPNRIISGLVKVKGNVKEFTETAAIFEDGSREDDIDAVIFATGYSFDFPFLEDSVKVVKNKIPLYKKVFPPNLERPTLAIIGLIQPLGAIMPISELQGRWATQVFKGLKTLPSQSEMMAEISKAQEEIDKRYVESQRHTIQGDYIDTMEELADLVGVRPNLLSLAFTDPKLALHLLLGPCTPIHYRVQGPGKWDGARKAILTTDDRIRKPLMTRVVERSSSMTSTMTIGKFMLALAFFAIIIAYFXLSYCHCPVFHWEAYLQMPSESDEIDSQFHIAQKSTLMSLSKALIHFPFSYNETCFPFVLTHLPSTHDPSLFLVVIPRLGAQVLF

SEQ ID NO: 313 - protein, 423 aa, Homo Sapiens
  misc_feature (381)..(381): Xaa can be any naturally occurring amino acid
MMFSGFNADYEASSSRCSSASPAGDSLSYYHSPADSFSSMGSPVNAQDFCTDLAVSSANFIPTVTAISTSPDLQWLVQPALVSSVAPSQTRAPHPFGVPAPSAGAYSRAGVVKTMTGGRAQSIGRRGKVEQLSPEEEEKRRIRRERNKMAAAKCRNRRRELTDTLQAETDQLEDEKSALQTEIANLLKEKEKLEFILAAHRPACKIPDDLGFPEEMSVASLDLTGGLPEVATPESEEAFTLPLLNDPEPKPSVEPVKSISSMELKTEPFDDFLFPASSRPSGSETARSVPDMDLSGSFYAADWEPLHSGSLGMGPMATELEPLCTPVVTCTPSCTAYTSSFVFTYPEADSFPSCAAAHRKGSSSNEPSSDSLSSPTLLALXGGREGEAAGTHKCHCPSWCITERRNTSSLEGSCRPREDLICA

SEQ ID NO: 314 - protein, 516 aa, Homo Sapiens
  misc_feature (422)..(422): Xaa can be any naturally occurring amino acid
MAESWLRLSGAGPAEEAGPEGGLEEPDALDDSLTSLQWLQEFSILNAKAPALPPGGTDPHGYHQVPGSAAPGSPLAADPACLGQPHTPGKPTSSCTSRSAPPGLQAPPPDDVDYATNPHVKPPYSYATLICMAMQASKATKITLSAIYKWITDNFCYFRHADPTWQNSIRHNLSLNKCFIKVPREKDEPGKGGFWRIDPQYAERLLSGAFKKRRLPPVHIHPAFARQAAQEPSAVPRAGPLTVNTEAQQLLREFEEATGEAGWGAGEGRLGHKRKQPLPKRVAKVPRPPSTLLPTPEEQGELEPLKGNFDWEAIFDAGTLGGELGALEALELSPPLSPASHVDVDLTIHGRHIDCPATWGPSVEQAADSLDFDETFLATSFLQHPWDESGSGCLPPEPLFEAGDATLASDLQDWASVGAFLXEARPCPTSGQCPSQGPELPPNTGPQTPHHLGRGWARAPRLAPEATWPPAPAAIRFKPRRLKTRAQDQNRCLLSPAPPCTHSVSLLRVFPAPETG

SEQ ID NO: 315 - protein, 790 aa, Homo Sapiens
  misc_feature (764)..(764): Xaa can be any naturally occurring amino acid
MKTSPRRPLILKRRRLPLPVQNAPSETSEEEPKRSPAQQESNQAEASKEVAESNSCKFPAGIKIINHPTMPNTQVVAIPNNANIHSIITALTAKGKESGSSGPNKFILISCGGAPTQPPGLRPQTQTSYDAKRTEVTLETLGPKPAARDVNLPRPPGALCEQKRETCADGEAAGCTINNSLSNIQWLRKMSSDGLGSRSIKQEMEEKENCHLEQRQVKVEEPSRPSASWQNSVSERPPYSYMAMIQFAINSTERKRMTLKDIYTWIEDHFPYFKHIAKPGWKNSIRHNLSLHDMFVRETSANGKVSFWTIHPSANRYLTLDQVFKPLDPGSPQLPEHLESQQKRPNPELRRNMTIKTELPLGARRKMKPLLPRVSSYLVPIQFPVNQSLVLQPSVKVPLPLAASLMSSELARHSKRVRIAPKVLLAEEGIAPLSSAGPGKEEKLLFGEGFSPLLPVQTIKEEEIQPGEEMPHLARPIKVESPPLEEWPSPAPSFKEESSHSWEDSSQSPTPRPKKSYSGLRSPTRCVSEMLVIQHRERRERSRSRRKQHLLPPCVDEPELLFSEGPSTSRWAAELPFPADSSDPASQLSYSQEVGGPFKTPIKETLPISSTPSKSVLPRTPESWRLTPPAKVGGLDFSPVQTSQGASDPLPDPLGLMDLSTTPLQSAPPLESPQRLLSSEPLDLISVPFGNSSPSDIDVPKPGSPEPQVSGLAANRSLTEGLVLDTMNDSLSKILLDISFPGLDEDPLGPDNINWSQFIPELQXSPALAPVLKLSTIPGTPRLSAPQASE

SEQ ID NO: 316 - protein, 828 aa, Homo Sapiens
  misc_feature (802)..(802): Xaa can be any naturally occurring amino acid
MKTSPRRPLILKRRRLPLPVQNAPSETSEEEPKRSPAQQESNQAEASKEVAESNSCKFPAGIKIINHPTMPNTQVVAIPNNANIHSIITALTAKGKESGSSGPNKFILISCGGAPTQPPGLRPQTQTSYDAKRTEVTLETLGPKPAARDVNLPRPPGALCEQKRETCADGEAAGCTINNSLSNIQWLRKMSSDGLGSRSIKQEMEEKENCHLEQRQVKVEEPSRPSASWQNSVSERPPYSYMAMIQFAINSTERKRMTLKDIYTWIEDHFPYFKHIAKPGWKNSIRHNLSLHDMFVRETSANGKVSFWTIHPSANRYLTLDQVFKPLDPGSPQLPEHLESQQKRPNPELRRNMTIKTELPLGARRKMKPLLPRVSSYLVPIQFPVNQSLVLQPSVKVPLPLAASLMSSELARHSKRVRIAPKVFGEQVVFGYMSKFFSGDLRDFGTPITSLFNFIFLCLSVLLAEEGIAPLSSAGPGKEEKLLFGEGFSPLLPVQTIKEEEIQPGEEMPHLARPIKVESPPLEEWPSPAPSFKEESSHSWEDSSQSPTPRPKKSYSGLRSPTRCVSEMLVIQHRERRERSRSRRKQHLLPPCVDEPELLFSEGPSTSRWAAELPFPADSSDPASQLSYSQEVGGPFKTPIKETLPISSTPSKSVLPRTPESWRLTPPAKVGGLDFSPVQTSQGASDPLPDPLGLMDLSTTPLQSAPPLESPQRLLSSEPLDLISVPFGNSSPSDIDVPKPGSPEPQVSGLAANRSLTEGLVLDTMNDSLSKILLDISFPGLDEDPLGPDNINWSQFIPELQXSPALAPVLKLSTIPGTPRLSAPQASE

SEQ ID NO: 317 - protein, 775 aa, Homo Sapiens
  misc_feature (749)..(749): Xaa can be any naturally occurring amino acid
MKTSPRRPLILKRRRLPLPVQNAPSETSEEEPKRSPAQQESNQAEASKEVAESNSCKFPAGIKIINHPTMPNTQVVAIPNNANIHSIITALTAKGKESGSSGPNKFILISCGGAPTQPPGLRPQTQTSYDAKRTEVTLETLGPKPAARDVNLPRPPGALCEQKRETCADGEAAGCTINNSLSNIQWLRKMSSDGLGSRSIKQEMEEKENCHLEQRQVKVEEPSRPSASWQNSVSERPPYSYMAMIQFAINSTERKRMTLKDIYTWIEDHFPYFKHIAKPGWKNSIRHNLSLHDMFVRETSANGKVSFWTIHPSANRYLTLDQVFKQQKRPNPELRRNMTIKTELPLGARRKMKPLLPRVSSYLVPIQFPVNQSLVLQPSVKVPLPLAASLMSSELARHSKRVRIAPKVLLAEEGIAPLSSAGPGKEEKLLFGEGFSPLLPVQTIKEEEIQPGEEMPHLARPIKVESPPLEEWPSPAPSFKEESSHSWEDSSQSPTPRPKKSYSGLRSPTRCVSEMLVIQHRERRERSRSRRKQHLLPPCVDEPELLFSEGPSTSRWAAELPFPADSSDPASQLSYSQEVGGPFKTPIKETLPISSTPSKSVLPRTPESWRLTPPAKVGGLDFSPVQTSQGASDPLPDPLGLMDLSTTPLQSAPPLESPQRLLSSEPLDLISVPFGNSSPSDIDVPKPGSPEPQVSGLAANRSLTEGLVLDTMNDSLSKILLDISFPGLDEDPLGPDNINWSQFIPELQXSPALAPVLKLSTIPGTPRLSAPQASE

SEQ ID NO: 318 - protein, 670 aa, Homo Sapiens
  misc_feature (656)..(656): Xaa can be any naturally occurring amino acid
MAEAPQVVEIDPDFEPLPRPRSCTWPLPRPEFSQSNSATSSPAPSGSAAANPDAAAGLPSASAAAVSADFMSNLSLLEESEDFPQAPGSVAAAVAAAAAAAATGGLCGDFQGPEAGCLHPAPPQPPPPGPLSQHPPVPPAAAGPLAGQPRKSSSSRRNAWGNLSYADLITKAIESSAEKRLTLSQIYEWMVKSVPYFKDKGDSNSSAGWKNSIRHNLSLHSKFIRVQNEGTGKSSWWMLNPEGGKSGKSPRRRAASMDNNSKFAKSRSRAAKKKASLQSGQEGAGDSPGSQFSKWPASPGSHSNDDFDNWSTFRPRTSSNASTISGRLSPIMTEQDDLGEGDVHSMVYPPSAAKMASTLPSLSEISNPENMENLLDNLNLLSSPTSLTVSTQSSPGTMMQQTPCYSFAPPNTSLNSPSPNYQKYTYGQSSMSPLPQMPIQTLQDNKSSYGGMSQYNCAPGLLKELLTSDSPPHNDIMTPVDPGVAQPNSRVLGQNVMMGPNSVMSTYGSQASHNKMMNPSSHTHPGHAQQTSAVNGRPLPHTVSTMPHTSGMNRLTQVKTPVQVPLPHPMQMSALGGYSSVSSCNGYGRMGLLHQEKLPSDLDGMFIERLDCDMESIIRNDLMDGDTLDFNFDNVLPNQSFPHSVKTTTHSWVSGXGLVSRLHLKVLQIV

SEQ ID NO: 319 - protein, 717 aa, Homo Sapiens
  misc_feature (674)..(674): Xaa can be any naturally occurring amino acid
MAEAPASPAPLSPLEVELDPEFEPQSRPRSCTWPLQRPELQASPAKPSGETAADSMIPEEEDDEDDEDGGGRAGSAMAIGGGGGSGTLGSGLLLEDSARVLAPGGQDPGSGPATAAGGLSGGTQALLQPQQPLPPPQPGAAGGSGQPRKCSSRRNAWGNLSYADLITRAIESSPDKRLTLSQIYEWMVRCVPYFKDKGDSNSSAGWKNSIRHNLSLHSRFMRVQNEGTGKSSWWIINPDGGKSGKAPRRRAVSMDNSNKYTKSRGRAAKKKAALQTAPESADDSPSQLSKWPGSPTSRSSDELDAWTDFRSRTNSNASTVSGRLSPIMASTELDEVQDDDAPLSPMLYSSSASLSPSVSKPCTVELPRLTDMAGTMNLNDGLTENLMDDLLDNITLPPSQPSPTGGLMQRSSSFPYTTKGSGLGSPTSSFNSTVFGPSSLNSLRQSPMQTIQENKPATFSSMSHYGNQTLQDLLTSDSLSHSDVMMTQSDPLMSQASTAVSAQNSRRNVMLRNDPMMSFAAQPNQGSLVNQNLLHHQHQTQGALGGSRALSNSVSNMGLSESSSLGSAKHQQQSPVSQSMQTLSDSLSGSSLYSTSANLPVMGHEKFPSDLDLDMFNGSLECDMESIIRSELMDADGLDFNFDSLISTQNVVGLNVGNFTGAKQASSQSWVPGXRITEEGEVGKADPQTDTRPTEKTLCQICSQQVDSDTVYSLTPL

SEQ ID NO: 320 - protein, 431 aa, Homo Sapiens
  misc_feature (404)..(404): Xaa can be any naturally occurring amino acid
MKLEVFVPRAAHGDKQGSDLEGAGGSDAPSPLSAAGDDSLGSDGDCAANSPAAGGGARDTQGDGEQSAGGGPGAEEAIPAAAAAAVVAEGAEAGAAGPGAGGAGSGEGARSKPYTRRPKPPYSYIALIAMAIRDSAGGRLTLAEINEYLMGKFPFFRGSYTGWRNSVRHNLSLNDCFVKVLRDPSRPWGKDNYWMLNPNSEYTFADGVFRRRRKRLSHRAPVPAPGLRPEEAPGLPAAPPPAPAAPASPRMRSPARQEERASPAGKFSSSFAIDSILRKPFRSRRLRDTAPGTTLQWGAAPCPPLPAFPALLPAAPCRALLPLCAYGAGEPARLGAREAEVPPTAPPLLLAPLPAAAPAKPLRGPAAGGAHLYCPLRLPAALQAASVRRPGPHLPYPVETLLAXVAPRGPGTPSARRRGGGNAGPRADFAL

SEQ ID NO: 321 - protein, 592 aa, Homo Sapiens
  misc_feature (494)..(494): Xaa can be any naturally occurring amino acid
MTANGTAEAVQIQFGLINCGNKYLTAEAFGFKVNASASSLKKKQIWTLEQPPDEAGSAAVCLRSHLGRYLAADKDGNVTCEREVPGPDCRFLIVAHDDGRWSLQSEAHRRYFGGTEDRLSCFAQTVSPAEKWSVHIAMHPQVNIYSVTRKRYAHLSARPADEIAVDRDVPWGVDSLITLAFQDQRYSVQTADHRFLRHDGRLVARPEPATGYTLEFRSGKVAFRDCEGRYLAPSGPSGTLKAGKATKVGKDELFALEQSCAQVVLQAANERNVSTRQGMDLSANQDEETDQETFQLEIDRDTKKCAFRTHTGKYWTLTATGGVQSTASSKNASCYFDIEWRDRRITLRASNGKFVTSKKNGQLAASVETAGDSELFLMKLINRPIIVFRGEHGFIGCRKVTGTLDANRSSYDVFQLEFNDGAYNIKDSTGKYWTVGSDSAVTSSGDTPVDFFFEFCDYNKVAIKVGGRYLKGDHAGVLKASAETVDPASLWEYXGRPVLPRPCPHGGSCQPSLLTPSPPGGLQGGRQAPLPFKLETPEKTVPPPVAPMDSPLSPPPGFPTPLGSAAAAWPWEGFQMPLPSCLPRGESGTSFF

SEQ ID NO: 322 - protein, 321 aa, Homo Sapiens
  misc_feature (318)..(318): Xaa can be any naturally occurring amino acid
MVRARHQPGGLCLLLLLLCQFMEDRSAQAGNCWLRQAKNGRCQVLYKTELSKEECCSTGRLSTSWTEEDVNDNTLFKWMIFNGGAPNCIPCKETCENVDCGPGKKCRMNKKNKPRCVCAPDCSNITWKGPVCGLDGKTYRNECALLKARCKEQPELEVQYQGRCKKTCRDVFCPGSSTCVVDQTNNAYCVTCNRICPEPASSEQYLCGNDGVTYSSACHLRKATCLLGRSIGLAYEGKCIKAKSCEDIQCTGGKKCLWDFKVGRGRCSLCDELCPDSKSDEPVCASDNATYASECAMKEAACSSGVLLEVKHSGSCNXICP

SEQ ID NO: 323 - protein, 354 aa, Homo Sapiens
  misc_feature (345)..(345): Xaa can be any naturally occurring amino acid
MVRARHQPGGLCLLLLLLCQFMEDRSAQAGNCWLRQAKNGRCQVLYKTELSKEECCSTGRLSTSWTEEDVNDNTLFKWMIFNGGAPNCIPCKETCENVDCGPGKKCRMNKKNKPRCVCAPDCSNITWKGPVCGLDGKTYRNECALLKARCKEQPELEVQYQGRCKKTCRDVFCPGSSTCVVDQTNNAYCVTCNRICPEPASSEQYLCGNDGVTYSSACHLRKATCLLGRSIGLAYEGKCIKAKSCEDIQCTGGKKCLWDFKVGRGRCSLCDELCPDSKSDEPVCASDNATYASECAMKEAACSSGVLLEVKHSGSCNSISEDTEEEEEDEDQDYSFPISSILEWXTLYKCSVFT

SEQ ID NO: 324 - protein, 683 aa, Homo Sapiens
  misc_feature (648)..(648): Xaa can be any naturally occurring amino acid
MAEEEAPKKSRAAGGGASWELCAGALSARLAEEGSGDAGGRRRPPVDPRRLARQLLLLLWLLEAPLLLGVRAQAAGQGPGQGPGPGQQPPPPPQQQQSGQQYNGERGISVPDHGYCQPISIPLCTDIAYNQTIMPNLLGHTNQEDAGLEVHQFYPLVKVQCSAELKFFLCSMYAPVCTVLEQALPPCRSLCERARQGCEALMNKFGFQWPDTLKCEKFPVHGAGELCVGQNTSDKGTPTPSLLPEFWTSNPQHGGGGHRGGFPGGAGASERGKFSCPRALKVPSYLNYHFLGEKDCGAPCEPTKVYGLMYFGPEELRFSRTWIGIWSVLCCASTLFTVLTYLVDMRRFSYPERPIIFLSGCYTAVAVAYIAGFLLEDRVVCNDKFAEDGARTVAQGTKKEGCTILFMMLYFFSMASSIWWVILSLTWFLAAGMKWGHEAIEANSQYFHLAAWAVPAIKTITILALGQVDGDVLSGVCFVGLNNVDALRGFVLAPLFVYLFIGTSFLLAGFVSLFRIRTIMKHDGTKTEKLEKLMVRIGVFSVLYTVPATIVIACYFYEQAFRDQWERSWVAQSCKSYAIPCPHLQAGGGAPPHPPMSPDFTVFMIKYLMTLIVGITSGFWIWSGKTLNSWRKFYTRLTNSKQGETTVXDPGLSPCPGLGRGAAIPQSQRRGVRANPDISRFPH

SEQ ID NO: 325 - protein, 594 aa, Homo Sapiens
  misc_feature (566)..(566): Xaa can be any naturally occurring amino acid
MRPRSALPRLLLPLLLLPAAGPAQFHGEKGISIPDHGFCQPISIPLCTDIAYNQTIMPNLLGHTNQEDAGLEVHQFYPLVKVQCSPELRFFLCSMYAPVCTVLEQAIPPCRSICERARQGCEALMNKFGFQWPERLRCEHFPRHGAEQICVGQNHSEDGAPALLTTAPPPGLQPGAGGTPGGPGGGGAPPRYATLEHPFHCPRVLKVPSYLSYKFLGERDCAAPCEPARPDGSMFFSQEETRFARLWILTWSVLCCASTFFTVTTYLVDMQRFRYPERPIIFLSGCYTMVSVAYIAGFVLQERVVCNERFSEDGYRTVVQGTKKEGCTILFMMLYFFSMASSIWWVILSLTWFLAAGMKWGHEAIEANSQYFHLAAWAVPAVKTITILAMGQIDGDLLSGVCFVGLNSLDPLRGFVLAPLFVYLFIGTSFLLAGFVSLFRIRTIMKHDGTKTEKLERLMVRIGVFSVLYTVPATIVIACYFYEQAFREHWERSWVSQHCKSLAIPCPAHYTPRMSPDFTVYMIKYLMTLIVGITSGFWIWSGKTLHSWRKFYTRLTNSRHGETTVXGTPPGRNRAALSSARGGAPTDSVFYFFK

SEQ ID NO: 326 - protein, 173 aa, Homo Sapiens
  misc_feature (166)..(166): Xaa can be any naturally occurring amino acid
MTLEEFSAGEQKTERMDKVGDALEEVLSKALSQRTITVGVYEAAKLLNVDPDNVVLCLLAADEDDDRDVALQIHFTLIQAFCCENDINILRVSNPGRLAELLLLETDAGPAASEGAEQPPDLHCVLVTNPHSSQWKDPALSQLICFCRESRYMDQWVPVINLPERXWHLNENN

SEQ ID NO: 327 - protein, 177 aa, Homo Sapiens
  misc_feature (160)..(160): Xaa can be any naturally occurring amino acid
MTLEEVRGQDTVPESTARMQGAGKALHELLLSAQRQGCLTAGVYESAKVLNVDPDNVTFCVLAAGEEDEGDIALQIHFTLIQAFCCENDIDIVRVGDVQRLAAIVGAGEEAGAPGDLHCILISNPNEDAWKDPALEKLSLFCEESRSVNDWVPSITLPEXQPGGDLGLIDVVTPRGA

SEQ ID NO: 328 - protein, 395 aa, Homo Sapiens
  misc_feature (346)..(346): Xaa can be any naturally occurring amino acid
MVAALLGGGGEARGGTVPGAWLCLMALLQLLGSAPRGSGLAHGRRLICWQALLQCQGEPECSYAYNQYAEACAPVLAQHGGGDAPGAAAAAFPASAASFSSRWRCPSHCISALIQLNHTRRGPALEDCDCAQDENCKSTKRAIEPCLPRTSGGGAGGPGAGGVMGCTEARRRCDRDSRCNLALSRYLTYCGKVFNGLRCTDECRTVIEDMLAMPKVALLNDCVCDGLERPICESVKENMARLCFGAELGNGPGSSGSDGGLDDYYDEDYDDEQRTGGAGGEQPLDDDDGVPHPPRPGSGAAASGGRGDLPYGPGRRSSGGGGRLAPRGAWTPLASILLLLLGPLFXPSRPPPLAAGEPASHSRARLDPAPGTCGLGQIEGMVGDTSQNFFQVNLV

SEQ ID NO: 329 - protein, 472 aa, Homo Sapiens
  misc_feature (445)..(445): Xaa can be any naturally occurring amino acid
MEVTADQPRWVSHHHPAVLNGQHPDTHHPGLSHSYMDAAQYPLPEEVDVLFNIDGQGNHVPPYYGNSVRATVQRYPPTHHGSQVCRPPLLHGSLPWLDGGKALGSHHTASPWNLSPFSKTSIHHGSPGPLSVYPPASSSSLSGGHASPHLFTFPPTPPKDVSPDPSLSTPGSAGSARQDEKECLKYQVPLPDSMKLESSHSRGSMTALGGASSSTHHPITTYPPYVPEYSSGLFPPSSLLGGSPTGFGCKSRPKARSSTEGRECVNCGATSTPLWRRDGTGHYLCNACGLYHKMNGQNRPLIKPKRRLSAARRAGTSCANCQTTTTTLWRRNANGDPVCNACGLYYKLHNINRPLTMKKEGIQTRNRKMSSKSKKCKKVHDSLEDFPKNSSFNPAALSRHMSSLSHISPFSHSSHMLTTPTPMHPPSSLSFGPHHPSSMVTAMGXSPARCSQGPQRESLQSLSTCIFAGAVS

SEQ ID NO: 330 - protein, 471 aa, Homo Sapiens
  misc_feature (444)..(444): Xaa can be any naturally occurring amino acid
MEVTADQPRWVSHHHPAVLNGQHPDTHHPGLSHSYMDAAQYPLPEEVDVLFNIDGQGNHVPPYYGNSVRATVQRYPPTHHGSQVCRPPLLHGSLPWLDGGKALGSHHTASPWNLSPFSKTSIHHGSPGPLSVYPPASSSSLSGGHASPHLFTFPPTPPKDVSPDPSLSTPGSAGSARQDEKECLKYQVPLPDSMKLESSHSRGSMTALGGASSSTHHPITTYPPYVPEYSSGLFPPSSLLGGSPTGFGCKSRPKARSSTGRECVNCGATSTPLWRRDGTGHYLCNACGLYHKMNGQNRPLIKPKRRLSAARRAGTSCANCQTTTTTLWRRNANGDPVCNACGLYYKLHNINRPLTMKKEGIQTRNRKMSSKSKKCKKVHDSLEDFPKNSSFNPAALSRHMSSLSHISPFSHSSHMLTTPTPMHPPSSLSFGPHHPSSMVTAMGXSPARCSQGPQRESLQSLSTCIFAGAVS

SEQ ID NO: 331 - protein, 386 aa, Homo Sapiens
  misc_feature (383)..(383): Xaa can be any naturally occurring amino acid
MGDWSALGKLLDKVQAYSTAGGKVWLSVLFIFRILLLGTAVESAWGDEQSAFRCNTQQPGCENVCYDKSFPISHVRFWVLQIIFVSVPTLLYLAHVFYVMRKEEKLNKKEEELKVAQTDGVNVDMHLKQIEIKKFKYGIEEHGKVKMRGGLLRTYIISILFKSIFEVAFLLIQWYIYGFSLSAVYTCKRDPCPHQVDCFLSRPTEKTIFIIFMLVVSLVSLALNIIELFYVFFKGVKDRVKGKSDPYHATSGALSPAKDCGSQKYAYFNGCSSPTAPLSPMSPPGYKLVTGDRNNSSCRNYNKQASEQNWANYSAEQNRMGQAGSTISNSHAQPFDFPDDNQNSKKLAAGHELQPLAIVDQRPSSRASSRASSRPRPDDLEIXIQA

SEQ ID NO: 332 - protein, 290 aa, Homo Sapiens
  misc_feature (274)..(274): Xaa can be any naturally occurring amino acid
MNWSIFEGLLSGVNKYSTAFGRIWLSLVFIFRVLVYLVTAERVWSDDHKDFDCNTRQPGCSNVCFDEFFPVSHVRLWALQLILVTCPSLLVVMHVAYREVQEKRHREAHGENSGRLYLNPGKKRGGLWWTYVCSLVFKASVDIAFLYVFHSFYPKYILPPVVKCHADPCPNIVDCFISKPSEKNIFTLFMVATAAICILLNLVELIYLVSKRCHECLAARKAQAMCTGHHPHGTTSSCKQDDLLSGDLIFLGSDSHPPLLPDRPRDHVKKTILXGAAWTGLAGWAWMGRL

SEQ ID NO: 333 - protein, 264 aa, Homo Sapiens
  misc_feature (185)..(185): Xaa can be any naturally occurring amino acid
MAEPQPPSGGLTDEAALSCCSDADPSTKDFLLQQTMLRVKDPKKSLDFYTRVLGMTLIQKCDFPIMKFSLYFLAYEDKNDIPKEKDEKIAWALSRKATLELTHNWGTEDDETQSYHNGNSDPRGFGHIGIAVPDVYSACKRFEELGVKFVKKPDDGKMKGLAFIQDPDGYWIEILNPNKMATLMXCCENSPLRFQKKGNNVIQDIYIPEASRTDGSLSRFKLFFSPFPLPISAVPFHLTVQSFWFSSSALSHVLEYSCVTLFFR

SEQ ID NO: 334 - protein, 217 aa, Homo Sapiens
  misc_feature (210)..(210): Xaa can be any naturally occurring amino acid
MNPSMKQKQEEIKENIKNSSVPRRTLKMIQPSASGSLVGRENELSAGLSKRKHRNDHLTSTTSSPGVIVPESSENKNLGGVTQESFDLMIKENPSSQYWKEVAEKRRKALYEALKENEKLHKEIEQKDNEIARLKKENKELAEVAEHVQYMAELIERLNGEPLDNFESLDNQEFDSEEETVEDSLVEDSEIGTCAEGTVSSSTDAKPCIXNALIFDC

SEQ ID NO: 335 - protein, 401 aa, Homo Sapiens
  misc_feature (395)..(395): Xaa can be any naturally occurring amino acid
MGCLGNSKTEDQRNEEKAQREANKKIEKQLQKDKQVYRATHRLLLLGAGESGKSTIVKQMRILHVNGFNGEGGEEDPQAARSNSDGEKATKVQDIKNNLKEAIETIVAAMSNLVPPVELANPENQFRVDYILSVMNVPDFDFPPEFYEHAKALWEDEGVRACYERSNEYQLIDCAQYFLDKIDVIKQADYVPSDQDLLRCRVLTSGIFETKFQVDKVNFHMFDVGGQRDERRKWIQCFNDVTAIIFVVASSSYNMVIREDNQTNRLQEALNLFKSIWNNRWLRTISVILFLNKQDLLAEKVLAGKSKIEDYFPEFARYTTPEDATPEPGEDPRVTRAKYFIRDEFLRISTASGDGRHYCYPHFTCAVDTENIRRVFNDCRDIIQRMHLRQYELLXEGNPQI

SEQ ID NO: 336 - protein, 402 aa, Homo Sapiens
  misc_feature (396)..(396): Xaa can be any naturally occurring amino acid
MGCLGNSKTEDQRNEEKAQREANKKIEKQLQKDKQVYRATHRLLLLGAGESGKSTIVKQMRILHVNGFNGEGGEEDPQAARSNSDGSEKATKVQDIKNNLKEAIETIVAAMSNLVPPVELANPENQFRVDYILSVMNVPDFDFPPEFYEHAKALWEDEGVRACYERSNEYQLIDCAQYFLDKIDVIKQADYVPSDQDLLRCRVLTSGIFETKFQVDKVNFHMFDVGGQRDERRKWIQCFNDVTAIIFVVASSSYNMVIREDNQTNRLQEALNLFKSIWNNRWLRTISVILFLNKQDLLAEKVLAGKSKIEDYFPEFARYTTPEDATPEPGEDPRVTRAKYFIRDEFLRISTASGDGRHYCYPHFTCAVDTENIRRVFNDCRDIIQRMHLRQYELLXEGNPQI

SEQ ID NO: 337 - protein, 387 aa, Homo Sapiens
  misc_feature (381)..(381): Xaa can be any naturally occurring amino acid
MGCLGNSKTEDQRNEEKAQREANKKIEKQLQKDKQVYRATHRLLLLGAGESGKSTIVKQMRILHVNGFNGDSEKATKVQDIKNNLKEAIETIVAAMSNLVPPVELANPENQFRVDYILSVMNVPDFDFPPEFYEHAKALWEDEGVRACYERSNEYQLIDCAQYFLDKIDVIKQADYVPSDQDLLRCRVLTSGIFETKFQVDKVNFHMFDVGGQRDERRKWIQCFNDVTAIIFVVASSSYNMVIREDNQTNRLQEALNLFKSIWNNRWLRTISVILFLNKQDLLAEKVLAGKSKIEDYFPEFARYTTPEDATPEPGEDPRVTRAKYFIRDEFLRISTASGDGRHYCYPHFTCAVDTENIRRVFNDCRDIIQRMHLRQYELLXEGNPQI

SEQ ID NO: 338 - protein, 331 aa, Homo Sapiens
  misc_feature (320)..(320): Xaa can be any naturally occurring amino acid
MVGKMWPVLWTLCAVRVTVDAISVETPQDVLRASQGKSVTLPCTYHTSTSSREGLIQWDKLLLTHTERVVIWPFSNKNYIHGELYKNRVSISNNAEQSDASITIDQLTMADNGTYECSVSLMSDLEGNTKSRVRLLVLVPPSKPECGIEGETIIGNNIQLTCQSKEGSPTPQYSWKRYNILNQEQPLAQPASGQPVSLKNISTDTSGYYICTSSNEEGTQFCNITVAVRSPSMNVALYVGIAVGVVAALIIIGIIIYCCCCRGKDDNTEDKEDARPNREAYEEPPEQLRELSREREEEDDYRQEEQRSTGRESPDHLDQXQASSRGRRRKG

SEQ ID NO: 339 - protein, 568 aa, Homo Sapiens
  misc_feature (559)..(559): Xaa can be any naturally occurring amino acid
MAALTRDPQFQKLQQWYREHRSELNLRRLFDANKDRFNHFSLTLNTNHGHILVDYSKNLVTEDVMRMLVDLAKSRGVEAARERMFNGEKINYTEGRAVLHVALRNRSNTPILVDGKDVMPEVNKVLDKMKSFCQRVRSGDWKGYTGKTITDVINIGIGGSDLGPLMVTEALKPYSSGGPRVWYVSNIDGTHIAKTLAQLNPESSLFIIASKTFTTQETITNAETAKEWFLQAAKDPSAVAKHFVALSTNTTKVKEFGIDPQNMFEFWDWVGGRYSLWSAIGLSIALHVGFDNFEQLLSGAHWMDQHFRTTPLEKNAPVLLALLGIWYINCFGCETHAMLPYDQYLHRFAAYFQQGDMESNGKYITKSGTRVDHQTGPIVWGEPGTNGQHAFYQLIHQGTKMIPCDFLIPVQTQHPIRKGLHHKILLANFLAQTEALMRGKSTEEARKELQAAGKSPEDLERLLPHKVFEGNRPTNSIVFTKLTPFMLGALVAMYEHKIFVQGIIWDINSFDQWGVELGKQLAKKIEPELDGSAQVTSHDASTNGLINFIKQQREARVQXTRAHLQPPL

SEQ ID NO: 340 - protein, 597 aa, Homo Sapiens
  misc_feature (549)..(549): Xaa can be any naturally occurring amino acid
MALAGCPDSFLHHPYYQDKVEQTPRSQQDPAGPGLPAQSDRLANHQEDDVDLEALVNDMNASLESLYSACSMQSDTVPLLQNGQHARSQPRASGPPRSIQPQVSPRQRVQRSQPVHILAVRRLQEEDQQFRTSSLPAIPNPFPELCGPGSPPVLTPGSLPPSQAAAKQDVKVFSEDGTSKVVEILADMTARDLCQLLVYKSHCVDDNSWTLVEHHPHLGLERCLEDHELVVQVESTMASESKFLFRKNYAKYEFFKNPMNFFPEQMVTWCQQSNGSQTQLLQEPRHLQLLADLEDSNIFSLIAGRKQYNAPTDHGLCIKPNKVRNETKELRLLCAEDEQTRTCWMTAFRLLKYGMLLYQNYRIPQQRKALLSPFSTPVRSVSENSLVAMDFSGQTGRVIENPAEAQSAALEEGHAWRKRSTRMNILGSQSPLHPSTLSTVIHRTQHWFHGRISREESHRIIKQQGLVDGLFLLRDSQSNPKAFVLTLCHHQKIKNFQILPCEDDGQTFFSLDDGNTKFSDLIQLVDFYQLNKGVLPCKLKHHCIRVALXPQMSSRLKTGGSEHWSEEAVCALVKNTHRFCTWGPRARWVCSVPADQD

SEQ ID NO: 341 - protein, 585 aa, Homo Sapiens
  misc_feature (537)..(537): Xaa can be any naturally occurring amino acid
MNASLESLYSACSMQSDTVPLLQNGQHARSQPRASGPPRSIQPQVSPRQRVQRSQPVHILAVRRLQEEDQQFRTSSLPAIPNPFPELCGPGSPPVLTPGSLPPSQAAAKQDVKVFSEDGTSKVVEILADMTARDLCQLLVYKSHCVDDNSWTLVEHHPHLGLERCLEDHELVVQVESTMASESKFLFRKNYAKYEFFKNPMNFFPEQMVTWCQQSNGSQTQLLQNFLNSSSCPEIQGFLHVKELGKKSWKKLYVCLRRSGLYCSTKGTSKEPRHLQLLADLEDSNIFSLIAGRKQYNAPTDHGLCIKPNKVRNETKELRLLCAEDEQTRTCWMTAFRLLKYGMLLYQNYRIPQQRKALLSPFSTPVRSVSENSLVAMDFSGQTGRVIENPAEAQSAALEEGHAWRKRSTRMNILGSQSPLHPSTLSTVIHRTQHWFHGRISREESHRIIKQQGLVDGLFLLRDSQSNPKAFVLTLCHHQKIKNFQILPCEDDGQTFFSLDDGNTKFSDLIQLVDFYQLNKGVLPCKLKHHCIRVALXPQMSSRLKTGGSEHWSEEAVCALVKNTHRFCTWGPRARWVCSVPADQD

SEQ ID NO: 342 - protein, 643 aa, Homo Sapiens
  misc_feature (595)..(595): Xaa can be any naturally occurring amino acid
MALAGCPDSFLHHPYYQDKVEQTPRSQQDPAGPGLPAQSDRLANHQEDDVDLEALVNDMNASLESLYSACSMQSDTVPLLQNGQHARSQPRASGPPRSIQPQVSPRQRVQRSQPVHILAVRRLQEEDQQFRTSSLPAIPNPFPELCGPGSPPVLTPGSLPPSQAAAKQDVKVFSEDGTSKVVEILADMTARDLCQLLVYKSHCVDDNSWTLVEHHPHLGLERCLEDHELVVQVESTMASESKFLFRKNYAKYEFFKNPMNFFPEQMVTWCQQSNGSQTQLLQNFLNSSSCPEIQGFLHVKELGKKSWKKLYVCLRRSGLYCSTKGTSKEPRHLQLLADLEDSNIFSLIAGRKQYNAPTDHGLCIKPNKVRNETKELRLLCAEDEQTRTCWMTAFRLLKYGMLLYQNYRIPQQRKALLSPFSTPVRSVSENSLVAMDFSGQTGRVIENPAEAQSAALEEGHAWRKRSTRMNILGSQSPLHPSTLSTVIHRTQHWFHGRISREESHRIIKQQGLVDGLFLLRDSQSNPKAFVLTLCHHQKIKNFQILPCEDDGQTFFSLDDGNTKFSDLIQLVDFYQLNKGVLPCKLKHHCIRVALXPQMSSRLKTGGSEHWSEEAVCALVKNTHRFCTWGPRARWVCSVPADQD

SEQ ID NO: 343 - protein, 237 aa, Homo Sapiens
  misc_feature (218)..(218): Xaa can be any naturally occurring amino acid
MEAIAKYDFKATADDELSFKRGDILKVLNEECDQNWYKAELNGKDGFIPKNYIEMKPHPWFFGKIPRAKAEEMLSKQRHDGAFLIRESESAPGDFSLSVKFGNDVQHFKVLRDGAGKYFLWVVKFNSLNELVDYHRSTSVSRNQQIFLRDIEQVPQQPTYVQALFDFDPQEDGELGFRRGDFIHVMDNSDPNWWKGACHGQTGMFPRNYVTPVNRNVXESRSNYLKKVKNVKHIQKN

SEQ ID NO: 344 - protein, 566 aa, Homo Sapiens
  misc_feature (533)..(533): Xaa can be any naturally occurring amino acid
MELDLSPPHLSSSPEDLCPAPGTPPGTPRPPDTPLPEEVKRSQPLLIPTTGRKLREEERRATSLPSIPNPFPELCSPPSQSPILGGPSSARGLLPRDASRPHVVKVYSEDGACRSVEVAAGATARHVCEMLVQRAHALSDETWGLVECHPHLALERGLEDHESVVEVQAAWPVGGDSRFVFRKNFAKYELFKSSPHSLFPEKMVSSCLDAHTGISHEDLIQNFLNAGSFPEIQGFLQLRGSGRKLWKRFFCFLRRSGLYYSTKGTSKDPRHLQYVADVNESNVYVVTQGRKLYGMPTDFGFCVKPNKLRNGHKGLRIFCSEDEQSRTCWLAAFRLFKYGVQLYKNYQQAQSRHLHPSCLGSPPLRSASDNTLVAMDFSGHAGRVIENPREALSVALEEAQAWRKKTNHRLSLPMPASGTSLSAAIHRTQLWFHGRISREESQRLIGQQGLVDGLFLVRESQRNPQGFVLSLCHLQKVKHYLILPSEEEGRLYFSMDDGQTRFTDLLQLVEFHQLNRGILPCLLRHCCTRVALXPGRGLAHASARLQAARRPSTHPVDSGARPQGTG

SEQ ID NO: 345 - protein, 524 aa, Homo Sapiens
  misc_feature (484)..(484): Xaa can be any naturally occurring amino acid
MSGGGPSGGGPGGSGRARTSSFAEPGGGGGGGGGGPGGSASGPGGTGGGKASVGAMGGGVGASSSGGGPGGSGGGGSGGPGAGTSFPPPGVKLGRDSGKVTTVVATLGQGPERSQEVAYTDIKVIGNGSFGVVYQARLAETRELVAIKKVLQDKRFKNRELQIMRKLDHCNIVRLRYFFYSSGEKKDELYLNLVLEYVPETVYRVARHFTKAKLTIPILYVKVYMYQLFRSLAYIHSQGVCHRDIKPQNLLVDPDTAVLKLCDFGSAKQLVRGEPNVSYICSRYYRAPELIFGATDYTSSIDVWSAGCVLAELLLGQPIFPGDSGVDQLVEIIKVLGTPTREQIREMNPNYTEFKFPQIKAHPWTKVFKSRTPPEAIALCSSLLEYTPSSRLSPLEACAHSFFDELRCLGTQLPNNRPLPPLFNFSAGELSIQPSLNAILIPPHLRSPAGTTTLTPSSQALTETPTSSDWQSTDATPTLTNSSXGPHQAPFHFHLGAPRGAGKGGHSPSSSCPGWAPRLEGRGK

SEQ ID NO: 346 - protein, 535 aa, Homo Sapiens
  misc_feature (523)..(523): Xaa can be any naturally occurring amino acid
MALLPRALSAGAGPSWRRAARAFRGFLLLLPEPAALTRALSRAMACRQEPQPQGPPPAAGAVASYDYLVIGGGSGGLASARRAAELGARAAVVESHKLGGTCVNVGCVPKKVMWNTAVHSEFMHDHADYGFPSCEGKFNWRVIKEKRDAYVSRLNAIYQNNLTKSHIEIIRGHAAFTSDPKPTIEVSGKKYTAPHILIATGGMPSTPHESQIPGASLGITSDGFFQLEELPGRSVIVGAGYIAVEMAGILSALGSKTSLMIRHDKVLRSFDSMISTNCTEELENAGVEVLKFSQVKEVKKTLSGLEVSMVTAVPGRLPVMTMIPDVDCLLWAIGRVPNTKDLSLNKLGIQTDDKGHIIVDEFQNTNVKGIYAVGDVCGKALLTPVAIAAGRKLAHRLFEYKEDSKLDYNNIPTVVFSHPPIGTVGLTEDEAIHKYGIENVKTYSTSFTPMYHAVTKRKTKCVMKMVCANKEEKVVGIHMQGLGCDEMLQGFAVAVKMGATKADFDNTVAIHPTSSEELVTLRXEPGDTCGGQWDP

SEQ ID NO: 347 - protein, 307 aa, Homo Sapiens
  misc_feature (219)..(219): Xaa can be any naturally occurring amino acid
MPMILGYWDIRGLAHAIRLLLEYTDSSYEEKKYTMGDAPDYDRSQWLNEKFKLGLDFPNLPYLIDGAHKITQSNAILCYIARKHNLCGETEEEKIRVDILENQTMDNHMQLGMICYNPEFEKLKPKYLEELPEKLKLYSEFLGKRPWFAGNKITFVDFLVYDVLDLHRIFEPKCLDAFPNLKDFISRFEGLEKISAYMKSSRFLPRPVFSKMAVWGNKXGLEGQEVGVRSPYSACCPGCAAQLDSASQHLPPRSFLLFIPIFTPKTSLSLFTPPKPLSHAGPLKPQLPTILREHPLPSLPFPALKPA

SEQ ID NO: 348 - protein, 216 aa, Homo Sapiens
  misc_feature (211)..(211): Xaa can be any naturally occurring amino acid
MPPYTVVYFPVRGRCAALRMLLADQGQSWKEEVVTVETWQEGSLKASCLYGQLPKFQDGDLTLYQSNTILRHLGRTLGLYGKDQQEAALVDMVNDGVEDLRCKYISLIYTNYEAGKDDYVKALPGQLKPFETLLSQNQGGKTFIVGDQISFADYNLLDLLLIHEVLAPGCLDAFPLLSAYVGRLSARPKLKAFLASPEYVNLPINGNGKQXGLGGL

SEQ ID NO: 349 - protein, 308 aa, Homo Sapiens
  misc_feature (241)..(241): Xaa can be any naturally occurring amino acid
MGLELYLDLLSQPCRAVYIFAKKNDIPFELRIVDLIKGQHLSDAFAQVNPLKKVPALKDGDFTLTESVAILLYLTRKYKVPDYWYPQDLQARARVDEYLAWQHTTLRRSCLRALWHKVMFPVFLGGPVSPQTLAATLAELDVTLQLLEDKFLQNKAFLTGPHISLADLVAITELMHPVGAGCQVFEGRPKLATWRQRVEAAVGEDLFQEAHEVILKAKDFPPADPTIKQKLMPWVLAMIRXAGKPHPCTVLSSPQSIFISNGPWEPGPESRNGLLKTCPSPRAPHLPKPPSPPCLPQPPESHNENDAH

SEQ ID NO: 350 - protein, 830 aa, Homo Sapiens
  misc_feature (827)..(827): Xaa can be any naturally occurring amino acid
MEGAGGANDKKKISSERRKEKSRDAARSRRSKESEVFYELAHQLPLPHNVSSHLDKASVMRLTISYLRVRKLLDAGDLDIEDDMKAQMNCFYLKALDGFVMVLTDDGDMIYISDNVNKYMGLTQFELTGHSVFDFTHPCDHEEMREMLTHRNGLVKKGKEQNTQRSFFLRMKCTLTSRGRTMNIKSATWKVLHCTGHIHVYDTNSNQPQCGYKKPPMTCLVLICEPIPHPSNIEIPLDSKTFLSRHSLDMKFSYCDERITELMGYEPEELLGRSIYEYYHALDSDHLTKTHHDMFTKGQVTTGQYRMLAKRGGYVWVETQATVIYNTKNSQPQCIVCVNYVVSGIIQHDLIFSLQQTECVLKPVESSDMKMTQLFTKVESEDTSSLFDKLKKEPDALTLLAPAAGDTIISLDFGSNDTETDDQQLEEVPLYNDVMLPSPNEKLQNINLAMSPLPTAETPKPLRSSADPALNQEVALKLEPNPESLELSFTMPQIQDQTPSPSDGSTRQSSPEPNSPSEYCFYVDSDMVNEFKLELVEKLFAEDTEAKNPFSTQDTDLDLEMLAPYIPMDDDFQLRSFDQLSPLESSSASPESASPQSTVTVFQQTQIQEPTANATTTTATTDELKTVTKDRMEDIKILIASPSPTHIHKETTSATSSPYRDTQSRTASPNRAGKGVIEQTEKSHPRSPNVLSVALSQRTTVPEEELNPKILALQNAQRKRKMEHDGSLFQAVGIGTLLQQPDDHAATTSLSWKRVKGCKSSEQNGMEQKTIILIPSDLACRLLGQSMDESGLPQLTSYDCEVNAPIQGSRNLLQGEELLRALDQVNXAFS

SEQ ID NO: 351 - protein, 752 aa, Homo Sapiens
  misc_feature (736)..(736): Xaa can be any naturally occurring amino acid
MEGAGGANDKKKISSERRKEKSRDAARSRRSKESEVFYELAHQLPLPHNVSSHLDKASVMRLTISYLRVRKLLDAGDLDIEDDMKAQMNCFYLKALDGFVMVLTDDGDMIYISDNVNKYMGLTQFELTGHSVFDFTHPCDHEEMREMLTHRNGLVKKGKEQNTQRSFFLRMKCTLTSRGRTMNIKSATWKVLHCTGHIHVYDTNSNQPQCGYKKPPMTCLVLICEPIPHPSNIEIPLDSKTFLSRHSLDMKFSYCDERITELMGYEPEELLGRSIYEYYHALDSDHLTKTHHDMFTKGQVTTGQYRMLAKRGGYVWVETQATVIYNTKNSQPQCIVCVNYVVSGIIQHDLIFSLQQTECVLKPVESSDMKMTQLFTKVESEDTSSLFDKLKKEPDALTLLAPAAGDTIISLDFGSNDTETDDQQLEEVPLYNDVMLPSPNEKLQNINLAMSPLPTAETPKPLRSSADPALNQEVALKLEPNPESLELSFTMPQIQDQTPSPSDGSTRQSSPEPNSPSEYCFYVDSDMVNEFKLELVEKLFAEDTEAKNPFSTQDTDLDLEMLAPYIPMDDDFQLRSFDQLSPLESSSASPESASPQSTVTVFQQTQIQEPTANATTTTATTDELKTVTKDRMEDIKILIASPSPTHIHKETTSATSSPYRDTQSRTASPNRAGKGVIEQTEKSHPRSPNVLSVALSQRTTVPEEELNPKILALQNAQRKRKMEHDGSLFQAVGIIXHVDCWGNQWMKVDYHS

SEQ ID NO: 352 - protein, 1088 aa, Homo Sapiens
  misc_feature (1069)..(1069): Xaa can be any naturally occurring amino acid
MNSIKNVPARVLSRRPGHSLEAEREQFDKTQAISISKAINTQEAPVKEKHARRIILGTHHEKGAFTFWSYAIGLPLPSSSILSWKFCHVLHKVLRDGHPNVLHDCQRYRSNIREIGDLWGHLHDRYGQLVNVYTKLLLTKISFHLKHPQFPAGLEVTDEVLEKAAGTDVNNIFQLTVEMFDYMDCELKLSESVFRQLNTAIAVSQMSSGQCRLAPLIQVIQDCSHLYHYTVKLLFKLHSCLPADTLQGHRDRFHEQFHSLRNFFRRASDMLYFKRLIQIPRLPEGPPNFLRASALAEHIKPVVVIPEEAPEDEEPENLIEISTGPPAGEPVVVADLFDQTFGPPNGSVKDDRDLQIESLKREVEMLRSELEKIKLEAQRYIAQLKSQVNALEGELEEQRKQKQKALVDNEQLRHELAQLRAAQLEGERSQGLREEAERKASATEARYNKLKEKHSELVHVHAELLRKNADTAKQLTVTQQSQEEVARVKEQLAFQVEQVKRESELKLEEKSDQLEKLKRELEAKAGELARAQEALSHTEQSKSELSSRLDTLSAEKDALSGAVRQREADLLAAQSLVRETEAALSREQQRSSQEQGELQGRLAERESQEQGLRQRLLDEQFAVLRGAAAEAAGILQDAVSKLDDPLHLRCTSSPDYLVSRAQEALDAVSTLEEGHAQYLTSLADASALVAALTRFSHLAADTIINGGATSHLAPTDPADRLIDTCRECGARALELMGQLQDQQALRHMQASLVRTPLQGILQLGQELKPKSLDVRQEELGAVVDKEMAATSAAIEDAVRRIEDMMNQARHASSGVKLEVNERILNSCTDLMKAIRLLVTTSTSLQKEIVESGRGAATQQEFYAKNSRWTEGLISASKAVGWGATQLVEAADKVVLHTGKYEELIVCSHEIAASTAQLVAASKVKANKHSPHLSRLQECSRTVNERAANVVASTKSGQEQIEDRDTMDFSGLSLIKLKKQEMETQVRVLELEKTLEAERMRLGELRKQHYVLAGASGSPGEEVAIRPSTAPRSVTTKKPPLAQKPSVAPRQDHQLDKKDGIYPAQLVNYXAPQGSSRVAGDRPGPLQLP

SEQ ID NO: 353 - protein, 963 aa, Homo Sapiens
  misc_feature (918)..(918): Xaa can be any naturally occurring amino acid
MIAAQLLAYYFTELKDDQVKKIDKYLYAMRLSDETLIDIMTRFRKEMKNGLSRDFNPTATVKMLPTFVRSIPDGSEKGDFIALDLGGSSFRILRVQVNHEKNQNVHMESEVYDTPENIVHGSGSQLFDHVAECLGDFMEKRKIKDKKLPVGFTFSFPCQQSKIDEAILITWTKRFKASGVEGADVVKLLNKAIKKRGDYDANIVAVVNDTVGTMMTCGYDDQHCEVGLIIGTGTNACYMEELRHIDLVEGDEGRMCINTEWGAFGDDGSLEDIRTEFDREIDRGSLNPGKQLFEKMVSGMYLGELVRLILVKMAKEGLLFEGRITPELLTRGKFNTSDVSAIEKNKEGLHNAKEILTRLGVEPSDDDCVSVQHVCTIVSFRSANLVAATLGAILNRLRDNKGTPRLRTTVGVDGSLYKTHPQYSRRFHKTLRRLVPDSDVRFLLSESGSGKGAAMVTAVAYRLAEQHRQIEETLAHFHLTKDMLLEVKKRMRAEMELGLRKQTHNNAVVKMLPSFVRRTPDGTENGDFLALDLGGTNFRVLLVKIRSGKKRTVEMHNKIYAIPIEIMQGTGEELFDHIVSCISDFLDYMGIKGPRMPLGFTFSFPCQQTSLDAGILITWTKGFKATDCVGHDVVTLLRDAIKRREEFDLDVVAVVNDTVGTMMTCAYEEPTCEVGLIVGTGSNACYMEEMKNVEMVEGDQGQMCINMEWGAFGDNGCLDDIRTHYDRLVNEYSLNAGKQRYEKMISGMYLGEIVRNILIDFTKKGFLFRGQISETMKTRGIFETKFLSQIESDRLALLQVRAILQQLGLNSTCDDSILVKTVCGVVSRRAAQLCGAGMAAVVDKIRENRGLDRLNVTVGVDGTLYKLHPHFSRIMHQTVKELSPKCNVSFLLSEDGSGKGAALITAVGVRLRTEASSXESGIPSLLPLQHFSLQAATPYPPSELRWETLAPGPAGAGRKAKSN

SEQ ID NO: 354 - protein, 962 aa, Homo Sapiens
  misc_feature (917)..(917): Xaa can be any naturally occurring amino acid
MDCEHSLSLPCRGAEAWEIGIDKYLYAMRLSDETLIDIMTRFRKEMKNGLSRDFNPTATVKMLPTFVRSIPDGSEKGDFIALDLGGSSFRILRVQVNHEKNQNVHMESEVYDTPENIVHGSGSQLFDHVAECLGDFMEKRKIKDKKLPVGFTFSFPCQQSKIDEAILITWTKRFKASGVEGADVVKLLNKAIKKRGDYDANIVAVVNDTVGTMMTCGYDDQHCEVGLIIGTGTNACYMEELRHIDLVEGDEGRMCINTEWGAFGDDGSLEDIRTEFDREIDRGSLNPGKQLFEKMVSGMYLGELVRLILVKMAKEGLLFEGRITPELLTRGKFNTSDVSAIEKNKEGLHNAKEILTRLGVEPSDDDCVSVQHVCTIVSFRSANLVAATLGAILNRLRDNKGTPRLRTTVGVDGSLYKTHPQYSRRFHKTLRRLVPDSDVRFLLSESGSGKGAAMVTAVAYRLAEQHRQIEETLAHFHLTKDMLLEVKKRMRAEMELGLRKQTHNNAVVKMLPSFVRRTPDGTENGDFLALDLGGTNFRVLLVKIRSGKKRTVEMHNKIYAIPIEIMQGTGEELFDHIVSCISDFLDYMGIKGPRMPLGFTFSFPCQQTSLDAGILITWTKGFKATDCVGHDVVTLLRDAIKRREEFDLDVVAVVNDTVGTMMTCAYEEPTCEVGLIVGTGSNACYMEEMKNVEMVEGDQGQMCINMEWGAFGDNGCLDDIRTHYDRLVDEYSLNAGKQRYEKMISGMYLGEIVRNILIDFTKKGFLFRGQISETLKTRGIFETKFLSQIESDRLALLQVRAILQQLGLNSTCDDSILVKTVCGVVSRRAAQLCGAGMAAVVDKIRENRGLDRLNVTVGVDGTLYKLHPHFSRIMHQTVKELSPKCNVSFLLSEDGSGKGAALITAVGVRLRTEASSXESGIPSLLPLQHFSLQAATPYPPSELRWETLAPGPAGAGRKAKSN

SEQ ID NO: 355 - protein, 967 aa, Homo Sapiens
  misc_feature (922)..(922): Xaa can be any naturally occurring amino acid
MGQICQRESATAAEKPKLHLLAESEIDKYLYAMRLSDETLIDIMTRFRKEMKNGLSRDFNPTATVKMLPTFVRSIPDGSEKGDFIALDLGGSSFRILRVQVNHEKNQNVHMESEVYDTPENIVHGSGSQLFDHVAECLGDFMEKRKIKDKKLPVGFTFSFPCQQSKIDEAILITWTKRFKASGVEGADVVKLLNKAIKKRGDYDANIVAVVNDTVGTMMTCGYDDQHCEVGLIIGTGTNACYMEELRHIDLVEGDEGRMCINTEWGAFGDDGSLEDIRTEFDREIDRGSLNPGKQLFEKMVSGMYLGELVRLILVKMAKEGLLFEGRITPELLTRGKFNTSDVSAIEKNKEGLHNAKEILTRLGVEPSDDDCVSVQHVCTIVSFRSANLVAATLGAILNRLRDNKGTPRLRTTVGVDGSLYKTHPQYSRRFHKTLRRLVPDSDVRFLLSESGSGKGAAMVTAVAYRLAEQHRQIEETLAHFHLTKDMLLEVKKRMRAEMELGLRKQTHNNAVVKMLPSFVRRTPDGTENGDFLALDLGGTNFRVLLVKIRSGKKRTVEMHNKIYAIPIEIMQGTGEELFDHIVSCISDFLDYMGIKGPRMPLGFTFSFPCQQTSLDAGILITWTKGFKATDCVGHDVVTLLRDAIKRREEFDLDVVAVVNDTVGTMMTCAYEEPTCEVGLIVGTGSNACYMEEMKNVEMVEGDQGQMCINMEWGAFGDNGCLDDIRTHYDRLVDEYSLNAGKQRYEKMISGMYLGEIVRNILIDFTKKGFLFRGQISETLKTRGIFETKFLSQIESDRLALLQVRAILQQLGLNSTCDDSILVKTVCGVVSRRAAQLCGAGMAAVVDKIRENRGLDRLNVTVGVDGTLYKLHPHFSRIMHQTVKELSPKCNVSFLLSEDGSGKGAALITAVGVRLRTEASSXESGIPSLLPLQHFSLQAATPYPPSELRWETLAPGPAGAGRKAKSN

SEQ ID NO: 356 - protein, 951 aa, Homo Sapiens
  misc_feature (906)..(906): Xaa can be any naturally occurring amino acid
MAKRALRDFIDKYLYAMRLSDETLIDIMTRFRKEMKNGLSRDFNPTATVKMLPTFVRSIPDGSEKGDFIALDLGGSSFRILRVQVNHEKNQNVHMESEVYDTPENIVHGSGSQLFDHVAECLGDFMEKRKIKDKKLPVGFTFSFPCQQSKIDEAILITWTKRFKASGVEGADVVKLLNKAIKKRGDYDANIVAVVNDTVGTMMTCGYDDQHCEVGLIIGTGTNACYMEELRHIDLVEGDEGRMCINTEWGAFGDDGSLEDIRTEFDREIDRGSLNPGKQLFEKMVSGMYLGELVRLILVKMAKEGLLFEGRITPELLTRGKFNTSDVSAIEKNKEGLHNAKEILTRLGVEPSDDDCVSVQHVCTIVSFRSANLVAATLGAILNRLRDNKGTPRLRTTVGVDGSLYKTHPQYSRRFHKTLRRLVPDSDVRFLLSESGSGKGAAMVTAVAYRLAEQHRQIEETLAHFHLTKDMLLEVKKRMRAEMELGLRKQTHNNAVVKMLPSFVRRTPDGTENGDFLALDLGGTNFRVLLVKIRSGKKRTVEMHNKIYAIPIEIMQGTGEELFDHIVSCISDFLDYMGIKGPRMPLGFTFSFPCQQTSLDAGILITWTKGFKATDCVGHDVVTLLRDAIKRREEFDLDVVAVVNDTVGTMMTCAYEEPTCEVGLIVGTGSNACYMEEMKNVEMVEGDQGQMCINMEWGAFGDNGCLDDIRTHYDRLVDEYSLNAGKQRYEKMISGMYLGEIVRNILIDFTKKGFLFRGQISETLKTRGIFETKFLSQIESDRLALLQVRAILQQLGLNSTCDDSILVKTVCGVVSRRAAQLCGAGMAAVVDKIRENRGLDRLNVTVGVDGTLYKLHPHFSRIMHQTVKELSPKCNVSFLLSEDGSGKGAALITAVGVRLRTEASSXESGIPSLLPLQHFSLQAATPYPPSELRWETLAPGPAGAGRKAKSN

SEQ ID NO: 357 - protein, 354 aa, Homo Sapiens
  misc_feature (339)..(339): Xaa can be any naturally occurring amino acid
MVVMAPRTLFLLLSGALTLTETWAGSHSMRYFSAAVSRPGRGEPRFIAMGYVDDTQFVRFDSDSACPRMEPRAPWVEQEGPEYWEEETRNTKAHAQTDRMNLQTLRGYYNQSEASSHTLQWMIGCDLGSDGRLLRGYEQYAYDGKDYLALNEDLRSWTAADTAAQISKRKCEAANVAEQRRAYLEGTCVEWLHRYLENGKEMLQRADPPKTHVTHHPVFDYEATLRCWALGFYPAEIILTWQRDGEDQTQDVELVETRPAGDGTFQKWAAVVVPSGEEQRYTCHVQHEGLPEPLMLRWKQSSLPTIPIMGIVAGLVVLAAVVTGAAVAAVLWRKKSSDXKGGSYSQAASKYEGG

SEQ ID NO: 358 - protein, 173 aa, Homo Sapiens
  misc_feature (108)..(108): Xaa can be any naturally occurring amino acid
MSESSSKSSQPLASKQEKDGTEKRGRGRPRKQPPVSPGTALVGSQKEPSEVPTPKRPRGRPKGSKNKGAAKTRKTTTTPGRKPRGRPKKLEKEEEEGISQESSEEEQXPMRAACSSLEEQLPSGTGQLCSAPTAPAPSPGPPSPPPLAATPIFHLCPHHHTTQHTSRCRAPMG

SEQ ID NO: 359 - protein, 162 aa, Homo Sapiens
  misc_feature (97)..(97): Xaa can be any naturally occurring amino acid
MSESSSKSSQPLASKQEKDGTEKRGRGRPRKQPPKEPSEVPTPKRPRGRPKGSKNKGAAKTRKTTTTPGRKPRGRPKKLEKEEEEGISQESSEEEQXPMRAACSSLEEQLPSGTGQLCSAPTAPAPSPGPPSPPPLAATPIFHLCPHHHTTQHTSRCRAPMG

SEQ ID NO: 360 - protein, 125 aa, Homo Sapiens
  misc_feature (110)..(110): Xaa can be any naturally occurring amino acid
MSARGEGAGQPSTSAQGQPAAPAPQKRGRGRPRKQQQEPTGEPSPKRPRGRPKGSKNKSPSKAAQKKAEATGEKRPRGRPRKWPQQVVQKKPAQEETEETSSQESAEEDXGAPTFDFYLSSSWIF

SEQ ID NO: 361 - protein, 298 aa, Homo Sapiens
  misc_feature (289)..(289): Xaa can be any naturally occurring amino acid
MERPQPDSMPQDLSEALKEATKEVHTQAENAEFMRNFQKGQVTRDGFKLVMASLYHIYVALEEEIERNKESPVFAPVYFPEELHRKAALEQDLAFWYGPRWQEVIPYTPAMQRYVKRLHEVGRTEPELLVAHAYTRYLGDLSGGQVLKKIAQKALDLPSSGEGLAFFTFPNIASATKFKQLYRSRMNSLEMTPAVRQRVIEEAKTAFLLNIQLFEELQELLTHDTKDQSPSRAPGLRQRASNKVQDSAPVETPRGKPPLNTRSQAPLLRWVLTLSFLVATVAVGLYAMXMQACWLPGP

SEQ ID NO: 362 - protein, 278 aa, Homo Sapiens
  misc_feature (271)..(271): Xaa can be any naturally occurring amino acid
MSSYFVNSFCGRYPNGPDYQLHNYGDHSSVSEQFRDSASMHSGRYGYGYNGMDLSVGRSGSGHFGSGERARSYAASASAAPAEPRYSQPATSTHSPQPDPLPCSAVAPSPGSDSHHGGKNSLSNSSGASADAGSTHISSREGVGTASGAEEDAPASSEQASAQSEPSPAPPAQPQIYPWMRKLHISHDNIGGPEGKRARTAYTRYQTLELEKEFHFNRYLTRRRRIEIAHALCLSERQIKIWFQNRRMKWKKDNKLKSMSMAAAGGAFRPXVSERLKY

SEQ ID NO: 363 - protein, 343 aa, Homo Sapiens
  misc_feature (273)..(273): Xaa can be any naturally occurring amino acid
MATTGALGNYYVDSFLLGADAADELSVGRYAPGTLGQPPRQAATLAEHPDFSPCSFQSKATVFGASWNPVHAAGANAVPAAVYHHHHHHPYVHPQAPVAAAAPDGRYMRSWLEPTPGALSFAGLPSSRPYGIKPEPLSARRGDCPTLDTHTLSLTDYACGSPPVDREKQPSEGAFSENNAENESGGDKPPIDPNNPAANWLHARSTRKKRCPYTKHQTLELEKEFLFNMYLTRDRRYEVARLLNLTERQVKIWFQNRRMKMKKINKDRAKDEXCHLGLFRKKGKLERKRKNCPSPFRLLPSLTPTLASTIPAQSGSKPQATSFPRQTLFRLARRPAALMEEVL

SEQ ID NO: 364 - protein, 280 aa, Homo Sapiens
  misc_feature (267)..(267): Xaa can be any naturally occurring amino acid
MHVNGKVALVTGAAQGIGRAFAEALLLKGAKVALVDWNLEAGVQCKAALDEQFEPQKTLFIQCDVADQQQLRDTFRKVVDHFGRLDILVNNAGVNNEKNWEKTLQINLVSVISGTYLGLDYMSKQNGGEGGIIINMSSLAGLMPVAQQPVYCASKHGIVGFTRSAALAANLMNSGVRLNAICPGFVNTAILESIEKEENMGQYIEYKDHIKDMIKYYGILDPPLIANGLITLIEDDALNGAIMKITTSKGIHFQDYDTTPFQAKTQXTAYVLAIAENKHK

SEQ ID NO: 365 - protein, 481 aa, Homo Sapiens
  misc_feature (418)..(418): Xaa can be any naturally occurring amino acid
MAQKEGGRTVPCCSRPKVAALTAGTLLLLTAIGAASWAIVAVLLRSDQEPLYPVQVSSADARLMVFDKTEGTWRLLCSSRSNARVAGLSCEEMGFLRALTHSELDVRTAGANGTSGFFCVDEGRLPHTQRLLEVISVCDCPRGRFLAAICQDCGRRKLPVDRIVGGRDTSLGRWPWQVSLRYDGAHLCGGSLLSGDWVLTAAHCFPERNRVLSRWRVFAGAVAQASPHGLQLGVQAVVYHGGYLPFRDPNSEENSNDIALVHLSSPLPLTEYIQPVCLPAAGQALVDGKICTVTGWGNTQYYGQQAGVLQEARVPIISNDVCNGADFYGNQIKPKMFCAGYPEGGIDACQGDSGGPFVCEDSISRTPRWRLCGIVSWGTGCALAQKPGVYTKVSDFREWIFQAIKTHSEASGMVTQLXPVASRCAASRARGDPGGGIHAGPRMGRFSSWARSTGPRTPSLQGPLFHSGGPTQPRDHPTSPS

SEQ ID NO: 366 - protein, 249 aa, Homo Sapiens
  misc_feature (190)..(190): Xaa can be any naturally occurring amino acid
MTEYKLVVVGAGGVGKSALTIQLIQNHFVDEYDPTIEDSYRKQVVIDGETCLLDILDTAGQEEYSAMRDQYMRTGEGFLCVFAINNTKSFEDIHQYREQIKRVKDSDDVPMVLVGNKCDLAARTVESRQAQDLARSYGIPYIETSAKTRQGVEDAFYTLVREIRQHKLRKLNPPDESGPGCMSCKCVLSXRSTSSGHGGAGCRKEVQTEGGGRKDGSKEGRKGCWSPVTPGPWAEVTADPPREAVHRLS

SEQ ID NO: 367 - protein, 566 aa, Homo Sapiens
  misc_feature (530)..(530): Xaa can be any naturally occurring amino acid
MDLPVGPGAAGPSNVPAFLTKLWTLVSDPDTDALICWSPSGNSFHVFDQGQFAKEVLPKYFKHNNMASFVRQLNMYGFRKVVHIEQGGLVKPERDDTEFQHPCFLRGQEQLLENIKRKVTSVSTLKSEDIKIRQDSVTKLLTDVQLMKGKQECMDSKLLAMKHENEALWREVASLRQKHAQQQKVVNKLIQFLISLVQSNRILGVKRKIPLMLNDSGSAHSMPKYSRQFSLEHVHGSGPYSAPSPAYSSSSLYAPDAVASSGPIISDITELAPASPMASPGGSIDERPLSSSPLVRVKEEPPSPPQSPRVEEASPGRPSSVDTLLSPTALIDSILRESEPAPASVTALTDARGHTDTEGRPPSPPPTSTPEKCLSVACLDKNELSDHLDAMDSNLDNLQTMLSSHGFSVDTSALLDLFSPSVTVPDMSLPDLDSSLASIQELLSPQEPPRPPEAENSSPDSGKQLVHYTAQPLFLLDPGSVDTGSNDLPVLFELGEGSYFSEGDGFAEDPTISLLTGSEPPKAKDPTVSXRPRRSWASRPPPPPVQGWSWGGRAASRSWALVGRPP

SEQ ID NO: 368 - protein, 738 aa, Homo Sapiens
  misc_feature (733)..(733): Xaa can be any naturally occurring amino acid
MPEETQTQDQPMEEEEVETFAFQAEIAQLMSLIINTFYSNKEIFLRELISNSSDALDKIRYESLTDPSKLDSGKELHINLIPNKQDRTLTIVDTGIGMTKADLINNLGTIAKSGTKAFMEALQAGADISMIGQFGVGFYSAYLVAEKVTVITKHNDDEQYAWESSAGGSFTVRTDTGEPMGRGTKVILHLKEDQTEYLEERRIKEIVKKHSQFIGYPITLFVEKERDKEVSDDEAEEKEDKEEEKEKEEKESEDKPEIEDVGSDEEEEKKDGDKKKKKKIKEKYIDQEELNKTKPIWTRNPDDITNEEYGEFYKSLTNDWEDHLAVKHFSVEGQLEFRALLFVPRRAPFDLFENRKKKNNIKLYVRRVFIMDNCEELIPEYLNFIRGVVDSEDLPLNISREMLQQSKILKVIRKNLVKKCLELFTELAEDKENYKKFYEQFSKNIKLGIHEDSQNRKKLSELLRYYTSASGDEMVSLKDYCTRMKENQKHIYYITGETKDQVANSAFVERLRKHGLEVIYMIEPIDEYCVQQLKEFEGKTLVSVTKEGLELPEDEEEKKKQEEKKTKFENLCKIMKDILEKKVEKVVVSNRLVTSPCCIVTSTYGWTANMERIMKAQALRDNSTMGYMAAKKHLEINPDHSIIETLRQKAEADKNDKSVKDLVILLYETALLSSGFSLEDPQTHANRIYRMIKLGLGIDEDDPTADDTSAAVTEEMPPLEGDDDTSRMEEVDXSLAEG

SEQ ID NO: 369 - protein, 726 aa, Homo Sapiens
  misc_feature (642)..(642): Xaa can be any naturally occurring amino acid
MATAKGIAIGIDLGTTYSCVGVFQHGKVEIIANDQGNRTTPSYVAFTDTERLIGDAAKNQVAMNPQNTVFDAKRLIGRKFNDPVVQADMKLWPFQVINEGGKPKVLVSYKGENKAFYPEEISSMVLTKLKETAEAFLGHPVTNAVITVPAYFNDSQRQATKDAGVIAGLNVLRIINEPTAAAIAYGLDKGGQGERHVLIFDLGGGTFDVSILTIDDGIFEVKATAGDTHLGGEDFDNRLVSHFVEEFKRKHKKDISQNKRAVRRLRTACERAKRTLSSSTQANLEIDSLYEGIDFYTSITRARFEELCADLFRGTLEPVEKALRDAKMDKAKIHDIVLVGGSTRIPKVQRLLQDYFNGRDLNKSINPDEAVAYGAAVQAAILMGDKSEKVQDLLLLDVAPLSLGLETAGGVMTALIKRNSTIPTKQTQIFTTYSDNQPGVLIQVYEGERAMTKDNNLLGRFDLTGIPPAPRGVPQIEVTFDIDANGILNVTATDKSTGKVNKITITNDKGRLSKEEIERMVLDAEKYKAEDEVQREKIAAKNALESYAFNMKSVVSDEGLKGKISESDKNKILDKCNELLSWLEVNQLAEKDEFDHKRKELEQMCNPIITKLYQGGCTGPACGTGYVPGRPATGPTIEEVDXFFLELKHPRMPLHVFHSPHLQTSLLFLTRPESKLPSLGNSGEGVSCTTYHTPSHPVSDFGMDSGKLGPSLNRVMYLNVCYFQPP

SEQ ID NO: 370 - protein, 689 aa, Homo Sapiens
  misc_feature (640)..(640): Xaa can be any naturally occurring amino acid
MSARGPAIGIDLGTTYSCVGVFQHGKVEIIANDQGNRTTPSYVAFTDTERLIGDAAKNQVAMNPTNTIFDAKRLIGRKFEDATVQSDMKHWPFRVVSEGGKPKVQVEYKGETKTFFPEEISSMVLTKMKEIAEAYLGGKVHSAVITVPAYFNDSQRQATKDAGTITGLNVLRIINEPTAAAIAYGLDKKGCAGGEKNVLIFDLGGGTFDVSILTIEDGIFEVKSTAGDTHLGGEDFDNRMVSHLAEEFKRKHKKDIGPNKRAVRRLRTACERAKRTLSSSTQASIEIDSLYEGVDFYTSITRARFEELNADLFRGTLEPVEKALRDAKLDKGQIQEIVLVGGSTRIPKIQKLLQDFFNGKELNKSINPDEAVAYGAAVQAAILIGDKSENVQDLLLLDVTPLSLGIETAGGVMTPLIKRNTTIPTKQTQTFTTYSDNQSSVLVQVYEGERAMTKDNNLLGKFDLTGIPPAPRGVPQIEVTFDIDANGILNVTAADKSTGKENKITITNDKGRLSKDDIDRMVQEAERYKSEDEANRDRVAAKNALESYTYNIKQTVEDEKLRGKISEQDKNKILDKCQEVINWLDRNQMAEKDEYEHKQKELERVCNPIISKLYQGGPGGGSGGGGSGASGGPTIEEVDXACTQVSVNLFAFLSLSFFLFVSLKCPCAKYEIYCWKSLVYANERRGATT

SEQ ID NO: 371 - protein, 651 aa, Homo Sapiens
  misc_feature (647)..(647): Xaa can be any naturally occurring amino acid
MSKGPAVGIDLGTTYSCVGVFQHGKVEIIANDQGNRTTPSYVAFTDTERLIGDAAKNQVAMNPTNTVFDAKRLIGRRFDDAVVQSDMKHWPFMVVNDAGRPKVQVEYKGETKSFYPEEVSSMVLTKMKEIAEAYLGKTVTNAVVTVPAYFNDSQRQATKDAGTIAGLNVLRIINEPTAAAIAYGLDKKVGAERNVLIFDLGGGTFDVSILTIEDGIFEVKSTAGDTHLGGEDFDNRMVNHFIAEFKRKHKKDISENKRAVRRLRTACERAKRTLSSSTQASIEIDSLYEGIDFYTSITRARFEELNADLFRGTLDPVEKALRDAKLDKSQIHDIVLVGGSTRIPKIQKLLQDFFNGKELNKSINPDEAVAYGAAVQAAILSGDKSENVQDLLLLDVTPLSLGIETAGGVMTVLIKRNTTIPTKQTQTFTTYSDNQPGVLIQVYEGERAMTKDNNLLGKFELTGIPPAPRGVPQIEVTFDIDANGILNVSAVDKSTGKENKITITNDKGRLSKEDIERMVQEAEKYKAEDEKQRDKVSSKNSLESYAFNMKATVEDEKLQGKINDEDKQKILDKCNEIINWLDKNQTAEKEEFEHQQKELEKVCNPIITKLYQSAGGMPGGMPGGFPGGGAPPSGGASSGPTIEEVDXANQV

SEQ ID NO: 372 - protein, 498 aa, Homo Sapiens
  misc_feature (494)..(494): Xaa can be any naturally occurring amino acid
MSKGPAVGIDLGTTYSCVGVFQHGKVEIIANDQGNRTTPSYVAFTDTERLIGDAAKNQVAMNPTNTVFDAKRLIGRRFDDAVVQSDMKHWPFMVVNDAGRPKVQVEYKGETKSFYPEEVSSMVLTKMKEIAEAYLGKTVTNAVVTVPAYFNDSQRQATKDAGTIAGLNVLRIINEPTAAAIAYGLDKKVGAERNVLIFDLGGGTFDVSILTIEDGIFEVKSTAGDTHLGGEDFDNRMVNHFIAEFKRKHKKDISENKRAVRRLRTACERAKRTLSSSTQASIEIDSLYEGIDFYTSITRARFEELNADLFRGTLDPVEKALRDAKLDKSQIHDIVLVGGSTRIPKIQKLLQDFFNGKELNKSINPDEAVAYGAAVQAAILSGDKSENVQDLLLLDVTPLSLGIETAGGVMTVLIKRNTTIPTKQTQTFTTYSDNQPGVLIQVYEGERAMTKDNNLLGKFELTGMPGGMPGGFPGGGAPPSGGASSGPTIEEVDXANQV

SEQ ID NO: 373 - protein, 239 aa, Homo Sapiens
  misc_feature (206)..(206): Xaa can be any naturally occurring amino acid
MTERRVPFSLLRGPSWDPFRDWYPHSRLFDQAFGLPRLPEEWSQWLGGSSWPGYVRPLPPAAIESPAVAAPAYSRALSRQLSSGVSEIRHTADRWRVSLDVNHFAPDELTVKTKDGVVEITGKHEERQDEHGYISRCFTRKYTLPPGVDPTQVSSSLSPEGTLTVEAPMPKLATQSNEITIPVTFESRAQLGGPEAAKSDETAAKXSLSLDAHPCCRHWLCLPRHLCVLLIHLSSVFLK

SEQ ID NO: 374 - protein, 127 aa, Homo Sapiens
  misc_feature (103)..(103): Xaa can be any naturally occurring amino acid
MAGQAFRKFLPLFDRVLVERSAAETVTKGGIMLPEKSQGKVLQATVVAVGSGSKGKGGEIQPVSVKVGDKVLLPEYGGTKVVLDDKDYFLFRDGDILGKYVDXNKSLLKWHQHDAAHSTEVLKSFVM

SEQ ID NO: 375 - protein, 875 aa, Homo Sapiens
  misc_feature (859)..(859): Xaa can be any naturally occurring amino acid
MSVVGLDVGSQSCYIAVARAGGIETIANEFSDRCTPSVISFGSKNRTIGVAAKNQQITHANNTVSNFKRFHGRAFNDPFIQKEKENLSYDLVPLKNGGVGIKVMYMGEEHLFSVEQITAMLLTKLKETAENSLKKPVTDCVISVPSFFTDAERRSVLDAAQIVGLNCLRLMNDMTAVALNYGIYKQDLPSLDEKPRIVVFVDMGHSAFQVSACAFNKGKLKVLGTAFDPFLGGKNFDEKLVEHFCAEFKTKYKLDAKSKIRALLRLYQECEKLKKLMSSNSTDLPLNIECFMNDKDVSGKMNRSQFEELCAELLQKIEVPLYSLLEQTHLKVEDVSAVEIVGGATRIPAVKERIAKFFGKDISTTLNADEAVARGCALQCAILSPAFKVREFSVTDAVPFPISLIWNHDSEDTEGVHEVFSRNHAAPFSKVLTFLRRGPFELEAFYSDPQGVPYPEAKIGRFVVQNVSAQKDGEKSRVKVKVRVNTHGIFTISTASMVEKVPTEENEMSSEADMECLNQRPPENPDTDKNVQQDNSEAGTQPQVQTDAQQTSQSPPSPELTSEENKIPDADKANEKKVDQPPEAKKPKIKVVNVELPIEANLVWQLGKDLLNMYIETEGKMIMQDKLEKERNDAKNAVEEYVYEFRDKLCGPYEKFICEQDHQNFLRLLTETEDWLYEEGEDQAKQAYVDKLEELMKIGTPVKVRFQEAEERPKMFEELGQRLQHYAKIAADFRNKDEKYNHIDESEMKKVEKSVNEVMEWMNNVMNAQAKKSLDQDPVVRAQEIKTKIKELNNTCEPVVTQPKPKIESPKLERTPNGPNIDKKEEDLEDKNNFGAEPPHQNGECYPNEKNSVNMDLDXITLNWPIPSINKIFLP

SEQ ID NO: 376 - protein, 200 aa, Homo Sapiens
  misc_feature (156)..(156): Xaa can be any naturally occurring amino acid
MKVASGSTATAAAGPSCALKAGKTASGAGEVVRCLSEQSVAISRCAGGAGARLPALLDEQQVNVLLYDMNGCYSRLKELVPTLPQNRKVSKVEILQHVIDYIRDLQLELNSESEVGTPGGRGLPVRAPLSTLNGEISALTAEAACVPADDRILCRXSASPRDRRTPAIQGARGITCSVGLPQRASPDLRENKTDRRPLRP

SEQ ID NO: 377 - protein, 267 aa, Homo Sapiens
  misc_feature (150)..(150): Xaa can be any naturally occurring amino acid
MKVASGSTATAAAGPSCALKAGKTASGAGEVVRCLSEQSVAISRCAGGAGARLPALLDEQQVNVLLYDMNGCYSRLKELVPTLPQNRKVSKVEILQHVIDYIRDLQLELNSESEVGTPGGRGLPVRAPLSTLNGEISALTAEVRSRSDHXIILIPTGKRRPERAWALAPLPSHPCGYLAMRGCLRSLEKALPRRASWGRGRSLRSERRPFQPAGLISSRFHRRHAFLRTIASCVAEAPPPGTGGPQPSRGQEELRALWVSPNAPRRI

SEQ ID NO: 378 - protein, 160 aa, Homo Sapiens
  misc_feature (135)..(135): Xaa can be any naturally occurring amino acid
MKAFSPVRSVRKNSLSDHSLGISRSKTPVDDPMSLLYNMNDCYSKLKELVPSIPQNKKVSKMEILQHVIDYILDLQIALDSHPTIVSLHHQRPGQNQASRTPLTTLNTDISILSLQASEFPSELMSNDSKALCGXISGVHDFFYSLHNNNNNKFTESFKC

SEQ ID NO: 379 - protein, 200 aa, Homo Sapiens
  misc_feature (190)..(190): Xaa can be any naturally occurring amino acid
MASPFALLMVLVVLSCKSSCSLGCDLPETHSLDNRRTLMLLAQMSRISPSSCLMDRHDFGFPQEEFDGNQFQKAPAISVLHELIQQIFNLFTTKDSSAAWDEDLLDKFCTELYQQLNDLEACVMQEERVGETPLMNADSILAVKKYFRRITLYLTEKKYSPCAWEVVRAEIMRSLSLSTNLQERLRRKEXHLVQHENNSY

SEQ ID NO: 380 - protein, 605 aa, Homo Sapiens
  misc_feature (558)..(558): Xaa can be any naturally occurring amino acid
MMVVLLGATTLVLVAVAPWVLSAAAGGKNLKSPQKVEVDIIDDNFILRWNRSDESVGNVTFSFDYQKTGMDNWIKLSGCQNITSTKCNFSSLKLNVYEEIKLRIRAEKENTSSWYEVDSFTPFRKAQIGPPEVHLEAEDKAIVIHISPGTKDSVMWALDGLSFTYSLVIWKNSSGVEERIENIYSRHKIYKLSPETTYCLKVKAALLTSWKIGVYSPVHCIKTTVENELPPPENIEVSVQNQNYVLKWDYTYANMTFQVQWLHAFLKRNPGNHLYKWKQIPDCENVKTTQCVFPQNVFQKGIYLLRVQASDGNNTSFWSEEIKFDTEIQAFLLPPVFNIRSLSDSFHIYIGAPKQSGNTPVIQDYPLIYEIIFWENTSNAERKIIEKKTDVTVPNLKPLTVYCVKARAHTMDEKLNKSSVFSDAVCEKTKPGNTSKIWLIVGICIALFALPFVIYAAKVFLRCINYVFFPSLKPSSSIDEYFSEQPLKNLLLSTSEEQIEKCFIIENISTIATVEETNQTDEDHKKYSSQTSQDSGNYSNEDESESKTSEELQQDFVXPEMNCVKYKVFQQELHWEPEVLTFLSVTTERTFPCLGKEKTSSDHRS

SEQ ID NO: 381 - protein, 338 aa, Homo Sapiens
  misc_feature (332)..(332): Xaa can be any naturally occurring amino acid
MLLSQNAFIFRSLNLVLMVYISLVFGISYDSPDYTDESCTFKISLRNFRSILSWELKNHSIVPTHYTLLYTIMSKPEDLKVVKNCANTTRSFCDLTDEWRSTHEAYVTVLEGFSGNTTLFSCSHNFWLAIDMSFEPPEFEIVGFTNHINVMVKFPSIVEEELQFDLSLVIEEQSEGIVKKHKPEIKGNMSGNFTYIIDKLIPNTNYCVSVYLEHSDEQAVIKSPLKCTLLPPGQESESAESAKIGGIITVFLIALVLTSTIVTLKWIGYICLRNSLPKVLRQGLAKGWNAVAIHRCSHNALQSETPELKQSSCLSFPSSWDYKRASLCPSDXVLLCRK

SEQ ID NO: 382 - protein, 520 aa, Homo Sapiens
  misc_feature (516)..(516): Xaa can be any naturally occurring amino acid
MLLSQNAFIFRSLNLVLMVYISLVFGISYDSPDYTDESCTFKISLRNFRSILSWELKNHSIVPTHYTLLYTIMSKPEDLKVVKNCANTTRSFCDLTDEWRSTHEAYVTVLEGFSGNTTLFSCSHNFWLAIDMSFEPPEFEIVGFTNHINVMVKFPSIVEEELQFDLSLVIEEQSEGIVKKHKPEIKGNMSGNFTYIIDKLIPNTNYCVSVYLEHSDEQAVIKSPLKCTLLPPGQESESAESAKIGGIITVFLIALVLTSTIVTLKWIGYICLRNSLPKVLNFHNFLAWPFPNLPPLEAMDMVEVIYINRKKKVWDYNYDDESDSDTEAAPRTSGGGYTMHGLTVRPLGQASATSTESQLIDPESEEEPDLPEVDVELPTMPKDSPQQLELLSGPCERRKSPLQDPFPEEDYSSTEGSGGRITFNVDLNSVFLRVLDDEDSDDLEAPLMLSSHLEEMVDPEDPDNVQSNHLLASGEGTQPTFPSPSSEGLWSEDAPSDQSDTSESDVDLGDGYIMRXLQNY

SEQ ID NO: 383 - protein, 1420 aa, Homo Sapiens
  misc_feature (1368)..(1368): Xaa can be any naturally occurring amino acid
MKSGSGGGSPTSLWGLLFLSAALSLWPTSGEICGPGIDIRNDYQQLKRLENCTVIEGYLHILLISKAEDYRSYRFPKLTVITEYLLLFRVAGLESLGDLFPNLTVIRGWKLFYNYALVIFEMTNLKDIGLYNLRNITRGAIRIEKNADLCYLSTVDWSLILDAVSNNYIVGNKPPKECGDLCPGTMEEKPMCEKTTINNEYNYRCWTTNRCQKMCPSTCGKRACTENNECCHPECLGSCSAPDNDTACVACRHYYYAGVCVPACPPNTYRFEGWRCVDRDFCANILSAESSDSEGFVIHDGECMQECPSGFIRNGSQSMYCIPCEGPCPKVCEEEKKTKTIDSVTSAQMLQGCTIFKGNLLINIRRGNNIASELENFMGLIEVVTGYVKIRHSHALVSLSFLKNLRLILGEEQLEGNYSFYVLDNQNLQQLWDWDHRNLTIKAGKMYFAFNPKLCVSEIYRMEEVTGTKGRQSKGDINTRNNGERASCESDVLHFTSTTTSKNRIIITWHRYRPPDYRDLISFTVYYKEAPFKNVTEYDGQDACGSNSWNMVDVDLPPNKDVEPGILLHGLKPWTQYAVYVKAVTLTMVENDHIRGAKSEILYIRTNASVPSIPLDVLSASNSSSQLIVKWNPPSLPNGNLSYYIVRWQRQPQDGYLYRHNYCSKDKIPIRKYADGTIDIEEVTENPKTEVCGGEKGPCCACPKTEAEKQAEKEEAEYRKVFENFLHNSIFVPRPERKRRDVMQVANTTMSSRSRNTTAADTYNITDPEELETEYPFFESRVDNKERTVISNLRPFTLYRIDIHSCNHEAEKLGCSASNFVFARTMPAEGADDIPGPVTWEPRPENSIFLKWPEPENPNGLILMYEIKYGSQVEDQRECVSRQEYRKYGGAKLNRLNPGNYTARIQATSLSGNGSWTDPVFFYVQAKTGYENFIHLIIALPVAVLLIVGGLVIMLYVFHRKRNNSRLGNGVLYASVNPEYFSAADVYVPDEWEVAREKITMSRELGQGSFGMVYEGVAKGVVKDEPETRVAIKTVNEAASMRERIEFLNEASVMKEFNCHHVVRLLGVVSQGQPTLVIMELMTRGDLKSYLRSLRPEMENNPVLAPPSLSKMIQMAGEIADGMAYLNANKFVHRDLAARNCMVAEDFTVKIGDFGMTRDIYETDYYRKGGKGLLPVRWMSPESLKDGVFTTYSDVWSFGVVLWEIATLAEQPYQGLSNEQVLRFVMEGGLLDKPDNCPDMLFELMRMCWQYNPKMRPSFLEIISSIKEEMEPGFREVSFYYSEENKLPEPEELDLEPENMESVPLDPSASSSSLPLPDRHSGHKAENGPGPGVLVLRASFDERQPYAHMNGGRKNERALPLPQSSTCXSLDPESVQTVTCAHAQRGGGGERVLTIHSQASCTSVDLQNCPCCPRETASLQ

SEQ ID NO: 384 - protein, 228 aa, Homo Sapiens
  misc_feature (200)..(200): Xaa can be any naturally occurring amino acid
MNCVCRLVLVVLSLWPDTAVAPGPPPGPPRVSPDPRAELDSTVLLTRSLLADTRQLAAQLRDKFPADGDHNLDSLPTLAMSAGALGALQLPGVLTRLRADLLSYLRHVQWLRRAGGSSLKTLEPELGTLQARLDRLLRRLQLLMSRLALPQPPPDPPAPPLAPPSSAWGGIRAAHAILGGLHLTLDWAVRGLLLLKTRLXPGAQSHHRPSKARSYLFIYFSTGGETAR

SEQ ID NO: 385 - protein, 403 aa, Homo Sapiens
  misc_feature (381)..(381): Xaa can be any naturally occurring amino acid
MAFVCLAIGCLYTFLISTTFGCTSSSDTEIKVNPPQDFEIVDPGYLGYLYLQWQPPLSLDHFKECTVEYELKYRNIGSETWKTIITKNLHYKDGFDLNKGIEAKIHTLLPWQCTNGSEVQSSWAETTYWISPQGIPETKVQDMDCVYYNWQYLLCSWKPGIGVLLDTNYNLFYWYEGLDHALQCVDYIKADGQNIGCRFPYLEASDYKDFYICVNGSSENKPIRSSYFTFQLQNIVKPLPPVYLTFTRESSCEIKLKWSIPLGPIPARCFDYEIEIREDDTTLVTATVENETYTLKTTNETRQLCFVVRSKVNIYCSDDGIWSEWSDKQCWEGEDLSKKTLLRFWLPFGFILILVIFVTGLLLRKPNTYPKMIPEFFCDTXRLSISRDMVLTQQFPVMAKCSI

SEQ ID NO: 386 - protein, 205 aa, Homo Sapiens
  misc_feature (181)..(181): Xaa can be any naturally occurring amino acid
MDWPHNLLFLLTISIFLGLGQPRSPKSKRKGQGRPGPLAPGPHQVPLDLVSRMKPYARMEEYERNIEEMVAQLRNSSELAQRKCEVNLQLWMSNKRSLSPWGYSINHDPSRIPVDLPEARCLCLGCVNPFTMQEDRSMVSVPVFSQVPVRRRLCPPPPRTGPCRQRAVMETIAVGCTCIFXITWPRSQASSPRPSSLHLCAKKGL

SEQ ID NO: 387 - protein, 307 aa, Homo Sapiens
  misc_feature (272)..(272): Xaa can be any naturally occurring amino acid
MAKVPDMFEDLKNCYSENEEDSSSIDHLSLNQKSFYHVSYGPLHEGCMDQSVSLSISETSKTSKLTFKESMVVVATNGKVLKKRRLSLSQSITDDDLEAIANDSEEEIIKPRSAPFSFLSNVKYNFMRIIKYEFILNDALNQSIIRANDQYLTAAALHNLDEAVKFDMGAYKSSKDDAKITVILRISKTQLYVTAQDEDQPVLLKEMPEIPKTITGSETNLLFFWETHGTKNYFTSVAHPNLFIATKQDYWVCLAGGPPSITDFQILENQAXVWSLTCLTCAVLTVHMYHVHEEAKSFTVSHLLSMY

SEQ ID NO: 388 - protein, 602 aa, Homo Sapiens
  misc_feature (570)..(570): Xaa can be any naturally occurring amino acid
MKVLLRLICFIALLISSLEADKCKEREEKIILVSSANEIDVRPCPLNPNEHKGTITWYKDDSKTPVSTEQASRIHQHKEKLWFVPAKVEDSGHYYCVVRNSSYCLRIKISAKFVENEPNLCYNAQAIFKQKLPVAGDGGLVCPYMEFFKNENNELPKLQWYKDCKPLLLDNIHFSGVKDRLIVMNVAEKHRGNYTCHASYTYLGKQYPITRVIEFITLEENKPTRPVIVSPANETMEVDLGSQIQLICNVTGQLSDIAYWKWNGSVIDEDDPVLGEDYYSVENPANKRRSTLITVLNISEIESRFYKHPFTCFAKNTHGIDAAYIQLIYPVTNFQKHMIGICVTLTVIIVCSVFIYKIFKIDIVLWYRDSCYDFLPIKASDGKTYDAYILYPKTVGEGSTSDCDIFVFKVLPEVLEKQCGYKLFIYGRDDYVGEDIVEVINENVKKSRRLIIILVRETSGFSWLGGSSEEQIAMYNALVQDGIKVVLLELEKIQDYEKMPESIKFIKQKHGAIRWSGDFTQGPQSAKTRFWKNVRYHMPVQRRSPSSKHQLLSPATKEKLQREAHVPLGXHGEVAKSSLGASCLMALQARLCLMLTCRVHGM

SEQ ID NO: 389 - protein, 258 aa, Homo Sapiens
  misc_feature (207)..(207): Xaa can be any naturally occurring amino acid
MNFQQRLQSLWTLARPFCPPLLATASQMQMVVLPCLGFTLLLWSQVSGAQGQEFHFGPCQVKGVVPQKLWEAFWAVKDTMQAQDNITSARLLQQEVLQNVSDAESCYLVHTLLEFYLKTVFKNYHNRTVEVRTLKSFSTLANNFVLIVSQLQPSQENEMFSIRDSAHRRFLLFRRAFKQLDVEAALTKALGEVDILLTWMQKFYKLXMSRPGPPSPWHWFVPCVISNSLPSYAVHWTLHALGHGSHSWPRIIVKEVIL

SEQ ID NO: 390 - protein, 282 aa, Homo Sapiens
  misc_feature (273)..(273): Xaa can be any naturally occurring amino acid
MDSYLLMWGLLTFIMVPGCQAELCDDDPPEIPHATFKAMAYKEGTMLNCECKRGFRRIKSGSLYMLCTGNSSHSSWDNQCQCTSSATRNTTKQVTPQPEEQKERKTTEMQSPMQPVDQASLPGHCREPPPWENEATERIYHFVVGQMVYYQCVQGYRALHRGPAESVCKMTHGKTRWTQPQLICTGEMETSQFPGEEKPQASPEGRPESETSCLVTTTDFQIQTEMAATMETSIFTTEYQVAVAGCVFLLISVLLLSGLTWQRRQRKSRRTIXKTKRTRISW

SEQ ID NO: 391 - protein, 638 aa, Homo Sapiens
  misc_feature (552)..(552): Xaa can be any naturally occurring amino acid
MAAPALSWRLPLLILLLPLATSWASAAVNGTSQFTCFYNSRANISCVWSQDGALQDTSCQVHAWPDRRRWNQTCELLPVSQASWACNLILGAPDSQKLTTVDIVTLRVLCREGVRWRVMAIQDFKPFENLRLMAPISLQVVHVETHRCNISWEISQASHYFERHLEFEARTLSPGHTWEEAPLLTLKQKQEWICLETLTPDTQYEFQVRVKPLQGEFTTWSPWSQPLAFRTKPAALGKDTIPWLGHLLVGLSGAFGFIILVYLLINCRNTGPWLKKVLKCNTPDPSKFFSQLSSEHGGDVQKWLSSPFPSSSFSPGGLAPEISPLEVLERDKVTQLLLQQDKVPEPASLSSNHSLTSCFTNQGYFFFHLPDALEIEACQVYFTYDPYSEEDPDEGVAGAPTGSSPQPLQPLSGEDDAYCTFPSRDDLLLFSPSLLGGPSPPSTAPGGSGAGEERMPPSLQERVPRDWDPQPLGPPTPGVPDLVDFQPPPELVLREAGEEVPDAGPREGVSFPWSRPPGQGEFRALNARLPLNTDAYLSLQELQGQDPTHLVXTDGQGGRQAAACSAPSLRRTLLRVLSPLLRTLSVQLQLDFSTRMAPTQSCTLGPSISKPPLLLPGPAARARNCVCCRGAVTPQLPR

SEQ ID NO: 392 - protein, 375 aa, Homo Sapiens
  misc_feature (351)..(351): Xaa can be any naturally occurring amino acid
MSNITDPQMWDFDDLNFTGMPPADEDYSPCMLETETLNKYVVIIAYALVFLLSLLGNSLVMLVILYSRVGRSVTDVYLLNLALADLLFALTLPIWAASKVNGWIFGTFLCKVVSLLKEVNFYSGILLLACISVDRYLAIVHATRTLTQKRHLVKFVCLGCWGLSMNLSLPFFLFRQAYHPNNSSPVCYEVLGNDTAKWRMVLRILPHTFGFIVPLFVMLFCYGFTLRTLFKAHMGQKHRAMRVIFAVVLIFLLCWLPYNLVLLADTLMRTQVIQESCERRNNIGRALDATEILGFLHSCLNPIIYAFIGQNFRHGFLKILAMHGLVSKEFLARHRVTSYTSSSVNVSSNLXKPSMKEYLFSEGKNNQHPEVVCGR

SEQ ID NO: 393 - protein, 403 aa, Homo Sapiens
  misc_feature (361)..(361): Xaa can be any naturally occurring amino acid
MEDFNMESDSFEDFWKGEDLSNYSYSSTLPPFLLDAAPCEPESLEINKYFVVIIYALVFLLSLLGNSLVMLVILYSRVGRSVTDVYLLNLALADLLFALTLPIWAASKVNGWIFGTFLCKVVSLLKEVNFYSGILLLACISVDRYLAIVHATRTLTQKRYLVKFICLSIWGLSLLLALPVLLFRRTVYSSNVSPACYEDMGNNTANWRMLLRILPQSFGFIVPLLIMLFCYGFTLRTLFKAHMGQKHRAMRVIFAVVLIFLLCWLPYNLVLLADTLMRTQVIQETCERRNHIDRALDATEILGILHSCLNPLIYAFIGQKFRHGLLKILAIHGLISKDSLPKDSRPSFVGSSSGHTSTTLXDLLPKCSPVGFLPSLHSHIPSLMSTGSSWSQCQCSPHCGHRK

SEQ ID NO: 394 - protein, 950 aa, Homo Sapiens
  misc_feature (895)..(895): Xaa can be any naturally occurring amino acid
MRPMRIFVNDDRHVMAKHSSVYPTQEELEAVQNMVSHTERALKAVSDWIDEQEKGSSEQAESDNMDVPPEDDSKEGAGEQKTEHMTRTLRGVMRVGLVAKGLLLKGDLDLELVLLCKEKPTTALLDKVADNLAIQLAAVTEDKYEILQSVDDAAIVIKNTKEPPLSLTIHLTSPVVREEMEKVLAGETLSVNDPPDVLDRQKCLAALASLRHAKWFQARANGLKSCVIVIRVLRDLCTRVPTWGPLRGWPLELLCEKSIGTANRPMGAGEALRRVLECLASGIVMPDGSGIYDPCEKEATDAIGHLDRQQREDITQSAQHALRLAAFGQLHKVLGMDPLPSKMPKKPKNENPVDYTVQIPPSTTYAITPMKRPMEEDGEEKSPSKKKKKIQKKEEKAEPPQAMNALMRLNQLKPGLQYKLVSQTGPVHAPIFTMSVEVDGNSFEASGPSKKTAKLHVAVKVLQDMGLPTGAEGRDSSKGEDSAEETEAKPAVVAPAPVVEAVSTPSAAFPSDATAEQGPILTKHGKNPVMELNEKRRGLKYELISETGGSHDKRFVMEVEVDGQKFQGAGSNKKVAKAYAALAALEKLFPDTPLALDANKKKRAPVPVRGGPKFAAKPHNPGFGMGGPMHNEVPPPPNLRGRGRGGSIRGRGRGRGFGGANHGGYMNAGAGYGSYGYGGNSATAGYSQFYSNGGHSGNASGGGGGGGGGSSGYGSYYQGDNYNSPVPPKHAGKKQPHGGQQKPSYGSGYQSHQGQQQSYNQSPYSNYGPPQGKQKGYNHGQGSYSYSNSYNSPGGGGGSDYNYESKFNYSGSGGRSGGNSYGSGGASYNPGSHGGYGGGSGGGSSYQGKQGGYSQSNYNSPGSGQNYSGPPSSYQSSQGGYGRNADHSMNYQYRXAPAGRRFLPSALTPHQKIEFYASQLTCQLALQAPAPIPSTLLCREVQRVTLWPVL

SEQ ID NO: 395 - protein, 742 aa, Homo Sapiens
  misc_feature (691)..(691): Xaa can be any naturally occurring amino acid
MRPMRIFVNDDRHVMAKHSSVYPTQEELEAVQNMVSHTERALKAVSDWIDEQEKGSSEQAESDNMDVPPEDDSKEGAGEQKTEHMTRTLRGVMRVGLVAKGLLLKGDLDLELVLLCKEKPTTALLDKVADNLAIQLAAVTEDKYEILQSVDDAAIVIKNTKEPPLSLTIHLTSPVVREEMEKVLAGETLSVNDPPDVLDRQKCLAALASLRHAKWFQARANGLKSCVIVIRVLRDLCTRVPTWGPLRGWPLELLCEKSIGTANRPMGAGEALRRVLECLASGIVMPDGSGIYDPCEKEATDAIGHLDRQQREDITQSAQHALRLAAFGQLHKVLGMDPLPSKMPKKPKNENPVDYTVQIPPSTTYAITPMKRPMEEDGEEKSPSKKKKKIQKKEEKAEPPQAMNALMRLNQLKPGLQYKLVSQTGPVHAPIFTMSVEVDGNSFEASGPSKKTAKLHVAVKVLQDMGLPTGAEGRDSSKGEDSAEETEAKPAVVAPAPVVEAVSTPSAAFPSDATAEQGPILTKHGKNPVMELNEKRRGLKYELISETGGSHDKRFVMEVEVDGQKFQGAGSNKKVAKAYAALAALEKLFPDTPLALDANKKKRAPVPVRGGPKFAAKPHNPGFGMGGPMHNEVPPPPNLRGRGRGGSIRGRGRGRGFGGANHGGYMNAGAGYGSYGYGGNSATAGYTGFVXIFNLLTNSQIWLMPLTVMKTISPHLNPEKPAFFLIASMLKRWEHVGNCILR

SEQ ID NO: 396 - protein, 459 aa, Homo Sapiens
  misc_feature (453)..(453): Xaa can be any naturally occurring amino acid
MDDIFTQCREGNAVAVRLWLDNTENDLNQGDDHGFSPLHWACREGRSAVVEMLIMRGARINVMNRGDDTPLHLAASHGHRDIVQKLLQYKADINAVNEHGNVPLHYACFWGQDQVAEDLVANGALVSICNKYGEMPVDKAKAPLRELLRERAEKMGQNLNRIPYKDTFWKGTTRTRPRNGTLNKHSGIDFKQLNFLTKLNENHSGELWKGRWQGNDIVVKVLKVRDWSTRKSRDFNEECPRLRIFSHPNVLPVLGACQSPPAPHPTLITHWMPYGSLYNVLHEGTNFVVDQSQAVKFALDMARGMAFLHTLEPLIPRHALNSRSVMIDEDMTARISMADVKFSFQCPGRMYAPAWVAPEALQKKPEDTNRRSADMWSFAVLLWELVTREVPFADLSNMEIGMKVALEGLRPTIPPGISPHVCKLMKICMNEDPAKRPKFDMIVPILEKMQDKXDWKVLA

SEQ ID NO: 397 - protein, 432 aa, Homo Sapiens
  misc_feature (404)..(404): Xaa can be any naturally occurring amino acid
MAHAMENSWTISKEYHIDEEVGFALPNPQENLPDFYNDWMFIAKHLPDLIESGQLRERVEKLNMLSIDHLTDHKSQRLARLVLGCITMAYVWGKGHGDVRKVLPRNIAVPYCQLSKKLELPPILVYADCVLANWKKKDPNKPLTYENMDVLFSFRDGDCSKGFFLVSLLVEIAAASAIKVIPTVFKAMQMQERDTLLKALLEIASCLEKALQVFHQIHDHVNPKAFFSVLRIYLSGWKGNPQLSDGLVYEGFWEDPKEFAGGSAGQSSVFQCFDVLLGIQQTAGGGHAAQFLQDMRRYMPPAHRNFLCSLESNPSVREFVLSKGDAGLREAYDACVKALVSLRSYHLQIVTKYILIPASQQPKENKTSEDPSKLEAKGTGGTDLMNFLKTVRSTTEKSLLKEGXCNPTRAHFIIAETSVCIPVITHCNRATN

SEQ ID NO: 398 - protein, 376 aa, Homo Sapiens
  misc_feature (326)..(326): Xaa can be any naturally occurring amino acid
MPITRMRMRPWLEMQINSNQIPGLIWINKEEMIFQIPWKHAAKHGWDINKDACLFRSWAIHTGRYKAGEKEPDPKTWKANFRCAMNSLPDIEEVKDQSRNKGSSAVRVYRMLPPLTKNQRKERKSKSSRDAKSKAKRKSCGDSSPDTFSDGLSSSTLPDDHSSYTVPGYMQDLEVEQALTPALSPCAVSSTLPDWHIPVEVVPDSTSDLYNFQVSPMPSTSEATTDEDEEGKLPEDIMKLLEQSEWQPTNVDGKGYLLNEPGVQPTSVYGDFSCKEEPEIDSPGGDIGLSLQRVFTDLKNMDATWLDSLLTPVRLPSIQAIPCAPXQGPWAPLIPLGKQDLASWWIWCREAGLLWAPQQPSVTPLPSGDGPPSLGH

SEQ ID NO: 399 - protein, 456 aa, Homo Sapiens
  misc_feature (452)..(452): Xaa can be any naturally occurring amino acid
MNLEGGGRGGEFGMSAVSCGNGKLRQWLIDQIDSGKYPGLVWENEEKSIFRIPWKHAGKQDYNREEDAALFKAWALFKGKFREGIDKPDPPTWKTRLRCALNKSNDFEELVERSQLDISDPYKVYRIVPEGAKKGAKQLTLEDPQMSMSHPYTMTTPYPSLPAQQVHNYMMPPLDRSWRDYVPDQPHPEIPYQCPMTFGPRGHHWQGPACENGCQVTGTFYACAPPESQAPGVPTEPSIRSAEALAFSDCRLHICLYYREILVKELTTSSPEGCRISHGHTYDASNLDQVLFPYPEDNGHRKNIENLLSHLERGVVLWMAPDGLYAKRLCQSTIYWDGPLALCNDRPNKLERDQTCKLFDTQQFLSELQAFAHHGRSLPRFQVTLCFGEEFPDPQRQRKLITAHVEPLLARQLYYFAQQNSGHFLRGYDLPEHISNPEDYHRSIRHSSIQEXKMSR

SEQ ID NO: 400 - protein, 1183 aa, Homo Sapiens
  misc_feature (1180)..(1180): Xaa can be any naturally occurring amino acid
MAPRPRARPGVAVACCWLLTVVLRCCVSFNVDVKNSMTFSGPVEDMFGYTVQQYENEEGKWVLIGSPLVGQPKNRTGDVYKCPVGRGESLPCVKLDLPVNTSIPNVTEVKENMTFGSTLVTNPNGGFLACGPLYAYRCGHLHYTTGICSDVSPTFQVVNSIAPVQECSTQLDIVIVLDGSNSIYPWDSVTAFLNDLLERMDIGPKQTQVGIVQYGENVTHEFNLNKYSSTEEVLVAAKKIVQRGGRQTMTALGIDTARKEAFTEARGARRGVKKVMVIVTDGESHDNHRLKKVIQDCEDENIQRFSIAILGSYNRGNLSTEKFVEEIKSIASEPTEKHFFNVSDELALVTIVKTLGERIFALEATADQSAASFEMEMSQTGFSAHYSQDWVMLGAVGAYDWNGTVVMQKASQIIIPRNTTFNVESTKKNEPLASYLGYTVNSATASSGDVLYIAGQPRYNHTGQVIIYRMEDGNIKILQTLSGEQIGSYFGSILTTTDIDKDSNTDILLVGAPMYMGTEKEEQGKVYVYALNQTRFEYQMSLEPIKQTCCSSRQHNSCTTENKNEPCGARFGTAIAAVKDLNLDGFNDIVIGAPLEDDHGGAVYIYHGSGKTIRKEYAQRIPSGGDGKTLKFFGQSIHGEMDLNGDGLTDVTIGGLGGAALFWSRDVAVVKVTMNFEPNKVNIQKKNCHMEGKETVCINATVCFDVKLKSKEDTIYEADLQYRVTLDSLRQISRSFFSGTQERKVQRNITVRKSECTKHSFYMLDKHDFQDSVRITLDFNLTDPENGPVLDDSLPNSVHEYIPFAKDCGNKEKCISDLSLHVATTEKDLLIVRSQNDKFNVSLTVKNTKDSAYNTRTIVHYSPNLVFSGIEAIQKDSCESNHNITCKVGYPFLRRGEMVTFKILFQFNTSYLMENVTIYLSATSDSEEPPETLSDNVVNISIPVKYEVGLQFYSSASEYHISIAANETVPEVINSTEDIGNEINIFYLIRKSGSFPMPELKLSISFPNMTSNGYPVLYPTGLSSSENANCRPHIFEDPFSINSGKKMTTSTDHLKRGTILDCNTCKFATITCNLTSSDISQVNVSLILWKPTFIKSYFSSLNLTIRGELRSENASLVLSSSNQKRELAIQISKDGLPGRVPLWVILLSAFAGLLLLMLLILALWKIGFFKRPLKKKMEKXNIL

SEQ ID NO: 401 - protein, 1202 aa, Homo Sapiens
  misc_feature (1182)..(1182): Xaa can be any naturally occurring amino acid
MGPERTGAAPLPLLLVLALSQGILNCCLAYNVGLPEAKIFSGPSSEQFGYAVQQFINPKGNWLLVGSPWSGFPENRMGDVYKCPVDLSTATCEKLNLQTSTSIPNVTEMKTNMSLGLILTRNMGTGGFLTCGPLWAQQCGNQYYTTGVCSDISPDFQLSASFSPATQPCPSLIDVVVVCDESNSIYPWDAVKNFLEKFVQGLDIGPTKTQVGLIQYANNPRVVFNLNTYKTKEEMIVATSQTSQYGGDLTNTFGAIQYARKYAYSAASGGRRSATKVMVVVTDGESHDGSMLKAVIDQCNHDNILRFGIAVLGYLNRNALDTKNLIKEIKAIASIPTERYFFNVSDEAALLEKAGTLGEQIFSIEGTVQGGDNFQMEMSQVGFSADYSSQNDILMLGAVGAFGWSGTIVQKTSHGHLIFPKQAFDQILQDRNHSSYLGYSVAAISTGESTHFVAGAPRANYTGQIVLYSVNENGNITVIQAHRGDQIGSYFGSVLCSVDVDKDTITDVLLVGAPMYMSDLKKEEGRVYLFTIKEGILGQHQFLEGPEGIENTRFGSAIAALSDINMDGFNDVIVGSPLENQNSGAVYIYNGHQGTIRTKYSQKILGSDGAFRSHLQYFGRSLDGYGDLNGDSITDVSIGAFGQVVQLWSQSIADVAIEASFTPEKITLVNKNAQIILKLCFSAKFRPTKQNNQVAIVYNITLDADGFSSRVTSRGLFKENNERCLQKNMVVNQAQSCPEHIIYIQEPSDVVNSLDLRVDISLENPGTSPALEAYSETAKVFSIPFHKDCGEDGLCISDLVLDVRQIPAAQEQPFIVSNQNKRLTFSVTLKNKRESAYNTGIVVDFSENLFFASFSLPVDGTEVTCQVAASQKSVACDVGYPALKREQQVTFTINFDFNLQNLQNQASLSFQALSESQEENKADNLVNLKIPLLYDAEIHLTRSTNINFYEISSDGNVPSIVHSFEDVGPKFIFSLKVTTGSVPVSMATVIIHIPQYTKEKNPLMYLTGVQTDKAGDISCNADINPLKIGQTSSSVSFKSENFRHTKELNCRTASCSNVTCWLKDVHMKGEYFVNVTTRIWNGTFASSTFQTVQLTAAAEINTYNPEIYVIEDNTVTIPLMIMKPDEKAEVPTGVIIGSIIAGILLLLALVAILWKLGFFKRKYEKMTKNPDEIDETTELSSXTSRPTCSGNRQHPSQGLLFA

SEQ ID NO: 402 - protein, 1173 aa, Homo Sapiens
  misc_feature (1153)..(1153): Xaa can be any naturally occurring amino acid
MALRVLLLTALTLCHGFNLDTENAMTFQENARGFGQSVVQLQGSRVVVGAPQEIVAANQRGSLYQCDYSTGSCEPIRLQVPVEAVNMSLGLSLAATTSPPQLLACGPTVHQTCSENTYVKGLCFLFGSNLRQQPQKFPEALRGCPQEDSDIAFLIDGSGSIIPHDFRRMKEFVSTVMEQLKKSKTLFSLMQYSEEFRIHFTFKEFQNNPNPRSLVKPITQLLGRTHTATGIRKVVRELFNITNGARKNAFKILVVITDGEKFGDPLGYEDVIPEADREGVIRYVIGVGDAFRSEKSRQELNTIASKPPRDHVFQVNNFEALKTIQNQLREKIFAIEGTQTGSSSSFEHEMSQEGFSAAITSNGPLLSTVGSYDWAGGVFLYTSKEKSTFINMTRVDSDMNDAYLGYAAAIILRNRVQSLVLGAPRYQHIGLVAMFRQNTGMWESNANVKGTQIGAYFGASLCSVDVDSNGSTDLVLIGAPHYYEQTRGGQVSVCPLPRGRARWQCDAVLYGEQGQPWGRFGAALTVLGDVNGDKLTDVAIGAPGEEDNRGAVYLFHGTSGSGISPSHSQRIAGSKLSPRLQYFGQSLSGGQDLTMDGLVDLTVGAQGHVLLLRSQPVLRVKAIMEFNPREVARNVFECNDQVVKGKEAGEVRVCLHVQKSTRDRLREGQIQSVVTYDLALDSGRPHSRAVFNETKNSTRRQTQVLGLTQTCETLKLQLPNCIEDPVSPIVLRLNFSLVGTPLSAFGNLRPVLAEDAQRLFTALFPFEKNCGNDNICQDDLSITFSFMSLDCLVVGGPREFNVTVTVRNDGEDSYRTQVTFFFPLDLSYRKVSTLQNQRSQRSWRLACESASSTEVSGALKSTSCSINHPIFPENSEVTFNITFDVDSKASLGNKLLLKANVTSENNMPRTNKTEFQLELPVKYAVYMVVTSHGVSTKYLNFTASENTSRVMQHQYQVSNLGQRSLPISLVFLVPVRLNQTVIWDRPQVTFSENLSSTCHTKERLPSHSDFLAELRKAPVVNCSIAVCQRIQCDIPFFGIQEEFNATLKGNLSFDWYIKTSHNHLLIVSTAEILFNDSVFTLLPGQGAFVRSQTETKVEPFEVPNPLPLIVGSSVGGLLLLALITAALYKLGFFKRQYKDMMSEGGPPGAEPQXRLLPDRAASRWPAGLCPDHT

SEQ ID NO: 403 - protein, 811 aa, Homo Sapiens
  misc_feature (800)..(800): Xaa can be any naturally occurring amino acid
MPRAPAPLYACLLGLCALLPRLAGLNICTSGSATSCEECLLIHPKCAWCSKEDFGSPRSITSRCDLRANLVKNGCGGEIESPASSFHVLRSLPLSSKGSGSAGWDVIQMTPQEIAVNLRPGDKTTFQLQVRQVEDYPVDLYYLMDLSLSMKDDLDNIRSLGTKLAEEMRKLTSNFRLGFGSFVDKDISPFSYTAPRYQTNPCIGYKLFPNCVPSFGFRHLLPLTDRVDSFNEEVRKQRVSRNRDAPEGGFDAVLQAAVCKEKIGWRKDALHLLVFTTDDVPHIALDGKLGGLVQPHDGQCHLNEANEYTASNQMDYPSLALLGEKLAENNINLIFAVTKNHYMLYKNFTALIPGTTVEILDGDSKNIIQLIINAYNSIRSKVELSVWDQPEDLNLFFTATCQDGVSYPGQRKCEGLKIGDTASFEVSLEARSCPSRHTEHVFALRPVGFRDSLEVGVTYNCTCGCSVGLEPNSARCNGSGTYVCGLCECSPGYLGTRCECQDGENQSVYQNLCREAEGKPLCSGRGDCSCNQCSCFESEFGKIYGPFCECDNFSCARNKGVLCSGHGECHCGECKCHAGYIGDNCNCSTDISTCRGRDGQICSERGHCLCGQCQCTEPGAFGEMCEKCPTCPDACSTKRDCVECLLLHSGKPDNQTCHSLCRDEVITWVDTIVKDDQEAVLCFYKTAKDCVMMFTYVELPSGKSNLTVLREPECGNTPNAMTILLAVVGSILLVGLALLAIWKLLVTIHDRREFAKFQSERSRARYEMASNPLYRKPISTHTVDFTFNKFNKSYNGTVDXCFLLRGAGAGI

SEQ ID NO: 404 - protein, 783 aa, Homo Sapiens
  misc_feature (770)..(770): Xaa can be any naturally occurring amino acid
MCGSALAFFTAAFVCLQNDRRGPASFLWAAWVFSLVLGLGQGEDNRCASSNAASCARCLALGPECGWCVQEDFISGGSRSERCDIVSNLISKGCSVDSIEYPSVHVIIPTENEINTQVTPGEVSIQLRPGAEANFMLKVHPLKKYPVDLYYLVDVSASMHNNIEKLNSVGNDLSRKMAFFSRDFRLGFGSYVDKTVSPYISIHPERIHNQCSDYNLDCMPPHGYIHVLSLTENITEFEKAVHRQKISGNIDTPEGGFDAMLQAAVCESHIGWRKEAKRLLLVMTDQTSHLALDSKLAGIVVPNDGNCHLKNNVYVKSTTMEHPSLGQLSEKLIDNNINVIFAVQGKQFHWYKDLLPLLPGTIAGEIESKAANLNNLVVEAYQKLISEVKVQVENQVQGIYFNITAICPDGSRKPGMEGCRNVTSNDEVLFNVTVTMKKCDVTGGKNYAIIKPIGFNETAKIHIHRNCSCQCEDNRGPKGKCVDETFLDSKCFQCDENKCHFDEDQFSSESCKSHKDQPVCSGRGVCVCGKCSCHKIKLGKVYGKYCEKDDFSCPYHHGNLCAGHGECEAGRCQCFSGWEGDRCQCPSAAAQHCVNSKGQVCSGRGTCVCGRCECTDPRSIGRFCEHCPTCYTACKENWNCMQCLHPHNLSQAILDQCKTSCALMEQQHYVDQTSECFSSPSYLRIFFIIFIVTFLIGLLKVLIIRQVILQWNSNKIKSSSDYRVSASKKDKLILQSVCTRAVTYRREKPEEIKMDISKLNAHETFRCNFXKKIFKHLMGNWNC

SEQ ID NO: 405 - protein, 281 aa, Homo Sapiens
  misc_feature (147)..(147): Xaa can be any naturally occurring amino acid
MLAGAGRPGLPQGRHLCWLLCAFTLKLCQAEAPVQEEKLSASTSNLPCWLVEEFVVAEECSPCSNFRAKTTPECGPTGYVEKITCSSSKRNEFKSCRSALMEQRLFWKFEGAVVCVALIFACLVIIRQRQLDRKALEKVRKQIESIXLHSTLVSWVLETLSQTVKVKWTDLHSWFFGALWWNPLFPIFFFQIINEQNKKSKMVSFPSVTWSRKSWGQRGKGGGYLRPQSTKSSPPLLPCFPPLLLLISNFWDTISAKTFISHSKLISPQPYTQRRNKITDT

SEQ ID NO: 406 - protein, 338 aa, Homo Sapiens
  misc_feature (332)..(332): Xaa can be any naturally occurring amino acid
MTAKMETTFYDDALNASFLPSESGPYGYSNPKILKQSMTLNLADPVGSLKPHLRAKNSDLLTSPDVGLLKLASPELERLIIQSSNGHITTTPTPTQFLCPKNVTDEQEGFAEGFVRALAELHSQNTLPSVTSAAQPVNGAGMVAPAVASVAGGSGSGGFSASLHSEPPVYANLSNFNPGALSSGGGAPSYGAAGLAFPAQPQQQQQPPHHLPQQMPVQHPRLQALKEEPQTVPEMPGETPPLSPIDMESQERIKAERKRMRNRIAASKCRKRKLERIARLEEKVKTLKAQNSELASTANMLREQVAQLKQKVMNHVNSGCQLMLTQQLQTFXRETVGG

SEQ ID NO: 407 - protein, 1369 aa, Homo Sapiens
  misc_feature (1357)..(1357): Xaa can be any naturally occurring amino acid
MQSKVLLAVALWLCVETRAASVGLPSVSLDLPRLSIQKDILTIKANTTLQITCRGQRDLDWLWPNNQSGSEQRVEVTECSDGLFCKTLTIPKVIGNDTGAYKCFYRETDLASVIYVYVQDYRSPFIASVSDQHGVVYITENKNKTVVIPCLGSISNLNVSLCARYPEKRFVPDGNRISWDSKKGFTIPSYMISYAGMVFCEAKINDESYQSIMYIVVVVGYRIYDVVLSPSHGIELSVGEKLVLNCTARTELNVGIDFNWEYPSSKHQHKKLVNRDLKTQSGSEMKKFLSTLTIDGVTRSDQGLYTCAASSGLMTKKNSTFVRVHEKPFVAFGSGMESLVEATVGERVRIPAKYLGYPPPEIKWYKNGIPLESNHTIKAGHVLTIMEVSERDTGNYTVILTNPISKEKQSHVVSLVVYVPPQIGEKSLISPVDSYQYGTTQTLTCTVYAIPPPHHIHWYWQLEEECANEPSQAVSVTNPYPCEEWRSVEDFQGGNKIEVNKNQFALIEGKNKTVSTLVIQAANVSALYKCEAVNKVGRGERVISFHVTRGPEITLQPDMQPTEQESVSLWCTADRSTFENLTWYKLGPQPLPIHVGELPTPVCKNLDTLWKLNATMFSNSTNDILIMELKNASLQDQGDYVCLAQDRKTKKRHCVVRQLTVLERVAPTITGNLENQTTSIGESIEVSCTASGNPPPQIMWFKDNETLVEDSGIVLKDGNRNLTIRRVRKEDEGLYTCQACSVLGCAKVEAFFIIEGAQEKTNLEIIILVGTAVIAMFFWLLLVIILRTVKRANGGELKTGYLSIVMDPDELPLDEHCERLPYDASKWEFPRDRLKLGKPLGRGAFGQVIEADAFGIDKTATCRTVAVKMLKEGATHSEHRALMSELKILIHIGHHLNVVNLLGACTKPGGPLMVIVEFCKFGNLSTYLRSKRNEFVPYKTKGARFRQGKDYVGAIPVDLKRRLDSITSSQSSASSGFVEEKSLSDVEEEEAPEDLYKDFLTLEHLICYSFQVAKGMEFLASRKCIHRDLAARNILLSEKNVVKICDFGLARDIYKDPDYVRKGDARLPLKWMAPETIFDRVYTIQSDVWSFGVLLWEIFSLGASPYPGVKIDEEFCRRLKEGTRMRAPDYTTPEMYQTMLDCWHGEPSQRPTFSELVEHLGNLLQANAQQDGKDYIVLPISETLSMEEDSGLSLPTSPVSCMEEEEVCDPKFHYDNTAGISQYLQNSKRKSRPVSVKTFEDIPLEEPEVKVIPDDNQTDSGMVLASEELKTLEDRTKLSPSFGGMVPSKSRESVASEGSNQTSGYQSGYHSDDTDTTVYSSEEAELLKLIEIGVQTGSTAQILQPDSGTTLSSPPVXKEASTPQLPDIT

SEQ ID NO: 408 - protein, 750 aa, Homo Sapiens
  misc_feature (745)..(745): Xaa can be any naturally occurring amino acid
MATANFGKIQIGIYVEIKRSDGRIHQAMVTSLNEDNESVTVEWIENGDTKGKEIDLESIFSLNPDLVPDEEIEPSPETPPPPASSAKVNKIVKNRRTVASIKNDPPSRDNRVVGSARARPSQFPEQSSSAQQNGSVSDISPVQAAKKEFGPPSRRKSNCVKEVEKLQEKREKRRLQQQELREKRAQDVDATNPNYEIMCMIRDFRGSLDYRPLTTADPIDEHRICVCVRKRPLNKKETQMKDLDVITIPSKDVVMVHEPKQKVDLTRYLENQTFRFDYAFDDSAPNEMVYRFTARPLVETIFERGMATCFAYGQTGSGKTHTMGGDFSGKNQDCSKGIYALAARDVFLMLKKPNYKKLELQVYATFFEIYSGKVFDLLNRKTKLRVLEDGKQQVQVVGLQEREVKCVEDVLKLIDIGNSCRTSGQTSANAHSSRSHAVFQIILRRKGKLHGKFSLIDLAGNERGADTSSADRQTRLEGAEINKSLLALKECIRALGRNKPHTPFRASKLTQVLRDSFIGENSRTCMIATISPGMASCENTLNTLRYANRVKEFGISPSDIPFSQGSGSRPDLSPSYEYDDFSPSVTRVKELTVDPTAAGDVRPIMHHPPNQIDDLETQWGVGSSPQRDDLKLLCEQNEEEVSPQLFTFHEAVSQMVEMEEQVVEDHRAVFQESIRWLEDEKALLEMTEEVDYDVDSYATQLEAILEQKIDILTELRDKVKSFRAALQEEEQASKQINPKRPRALXTGICC

SEQ ID NO: 409 - protein, 735 aa, Homo Sapiens
  misc_feature (726)..(726): Xaa can be any naturally occurring amino acid
MAMDSSLQARLFPGLAIKIQRSNGLIHSANVRTVNLEKSCVSVEWAEGGATKGKEIDFDDVAAINPELLQLLPLHPKDNLPLQENVTIQKQKRRSVNSKIPAPKESLRSRSTRMSTVSELRITAQENDMEVELPAAANSRKQFSVPPAPTRPSCPAVAEIPLRMVSEEMEEQVHSIRGSSSANPVNSVRRKSCLVKEVEKMKNKREEKKAQNSEMRMKRAQEYDSSFPNWEFARMIKEFRATLECHPLTMTDPIEEHRICVCVRKRPLNKQELAKKEIDVISIPSKCLLLVHEPKLKVDLTKYLENQAFCFDFAFDETASNEVVYRFTARPLVQTIFEGGKATCFAYGQTGSGKTHTMGGDLSGKAQNASKGIYAMASRDVFLLKNQPCYRKLGLEVYVTFFEIYNGKLFDLLNKKAKLRVLEDGKQQVQVVGLQEHLVNSADDVIKMLDMGSACRTSGQTFANSNSSRSHACFQIILRAKGRMHGKFSLVDLAGNERGADTSSADRQTRMEGAEINKSLLALKECIRALGQNKAHTPFRESKLTQVLRDSFIGENSRTCMIATISPGISSCEYTLNTLRYADRVKELSPHSGPSGEQLIQMETEEMEACSNGALIPGNLSKEEEELSSQMSSFNEAMTQIRELEEKAMEELKEIIQQGPDWLELSEMTEQPDYDLETFVNKAESALAQQAKHFSALRDVIKALRLAMQLEEQASRQISSKKRPQXRLQIKICLV

SEQ ID NO: 410 - protein, 179 aa, Homo Sapiens
  misc_feature (139)..(139): Xaa can be any naturally occurring amino acid
MNSLVSWQLLLFLCATHFGEPLEKVASVGNSRPTGQQLESLGLLAPGEQSLPCTERKPAATARLSRRGTSLSPPPESSGSPQQPGLSAPHSRQIPAPQGAVLVQREKDLPNYNWNSFGLRFGKREAAPGNHGRSAGRGXGRRCGAVNFRPQRSQSMRGGGGGRGRRAKGGGAGASNPRQ

SEQ ID NO: 411 - protein, 496 aa, Homo Sapiens
  misc_feature (471)..(471): Xaa can be any naturally occurring amino acid
MAVSDALLPSFSTFASGPAGREKTLRQAGAPNNRWREELSHMKRLPPVLPGRPYDLAAATVATDLESGGAGAACGGSNLAPLPRRETEEFNDLLDLDFILSNSLTHPPESVAATVSSSASASSSSSPSSSGPASAPSTCSFTYPIRAGNDPGVAPGGTGGGLLYGRESAPPPTAPFNLADINDVSPSGGFVAELLRPELDPVYIPPQQPQPPGGGLMGKFVLKASLSAPGSEYGSPSVISVSKGSPDGSHPVVVAPYNGGPPRTCPKIKQEAVSSCTHLGAGPPLSNGHRPAAHDFPLGRQLPSRTTPTLGLEEVLSSRDCHPALPLPPGFHPHPGPNYPSFLPDQMQPQVPPLHYQELMPPGSCMPEEPKPKRGRRSWPRKRTATHTCDYAGCGKTYTKSSHLKAHLRTHTGEKPYHCDWDGCGWKFARSDELTRHYRKHTGHRPFQCQKCDRAFSRSDHLALHMKRHFXIPDSGYDPHCQKRIQYFLLFTLSSR

SEQ ID NO: 412 - protein, 462 aa, Homo Sapiens
  misc_feature (458)..(458): Xaa can be any naturally occurring amino acid
MATRVLSMSARLGPVPQPPAPQDEPVFAQLKPVLGAANPARDAALFPGEELKHAHHRPQAQPAPAQAPQPAQPPATGPRLPPEDLVQTRCEMEKYLTPQLPPVPIIPEHKKYRRDSASVVDQFFTDTEGLPYSINMNVFLPDITHLRTGLYKSQRPCVTHIKTEPVAIFSHQSETTAPPPAPTQALPEFTSIFSSHQTAAPEVNNIFIKQELPTPDLHLSVPTQQGHLYQLLNTPDLDMPSSTNQTAAMDTLNVSMSAAMAGLNTHTSAVPQTAVKQFQGMPPCTYTMPSQFLPQQATYFPPSPPSSEPGSPDRQAEMLQNLTPPPSYAATIASKLAIHNPNLPTTLPVNSQNIQPVRYNRRSNPDLEKRRIHYCDYPGCTKVYTKSSHLKAHLRTHTGEKPYKCTWEGCDWRFARSDELTRHYRKHTGAKPFQCGVCNRSFSRSDHLALHMKRHQNXALPV

SEQ ID NO: 413 - protein, 326 aa, Homo Sapiens
  misc_feature (277)..(277): Xaa can be any naturally occurring amino acid
MRAPHLHLSAASGARALAKLLPLLMAQLWAAEAALLPQNDTRLDPEAYGSPCARGSQPWQVSLFNGLSFHCAGVLVDQSWVLTAAHCGNKPLWARVGDDHLLLLQGEQLRRTTRSVVHPKYHQGSGPILPRRTDEHDLMLLKLARPVVLGPRVRALQLPYRCAQPGDQCQVAGWGTTAARRVKYNKGLTCSSITILSPKECEVFYPGVVTNNMICAGLDRGQDPCQSDSGGPLVCDETLQGILSWGVYPCGSAQHPAVYTQICKYMSWINKVIRSNXSRCYAPADPDVMLLLIQMPRGSIVHPLPPQSAELSPCLHCSNLCRPPHL

SEQ ID NO: 414 - protein, 290 aa, Homo Sapiens
  misc_feature (278)..(278): Xaa can be any naturally occurring amino acid
MWPLALVIASLTLALSGGVSQESSKVLNTNGTSGFLPGGYTCFPHSQPWQAALLVQGRLLCGGVLVHPKWVLTAAHCLKEGLKVYLGKHALGRVEAGEQVREVVHSIPHPEYRRSPTHLNHDHDIMLLELQSPVQLTGYIQTLPLSHNNRLTPGTTCRVSGWGTTTSPQVNYPKTLQCANIQLRSDEECRQVYPGKITDNMLCAGTKEGGKDSCEGDSGGPLVCNRTLYGIVSWGDFPCGQPDRPGVYTRVSRYVLWIRETIRKYETQQQKWLKGPQXKLRNVPASILSP

SEQ ID NO: 415 - protein, 231 aa, Homo Sapiens
  misc_feature (224)..(224): Xaa can be any naturally occurring amino acid
MWDLVLSIALSVGCTGAVPLIQSRIVGGWECEKHSQPWQVAVYSHGWAHCGGVLVHPQWVLTAAHCLKKNSQVWLGRHNLFEPEDTGQRVPVSHSFPHPLYNMSLLKHQSLRPDEDSSHDLMLLRLSEPAKITDVVKVLGLPTQEPALGTTCYASGWGSIEPEEFLRPRSLQCVSLHLLSNDMCARAYSEKVTEFMLCAGLWTGGKDTCGVSHPYSQHLEGKGXFWGSTCL

SEQ ID NO: 416 - protein, 270 aa, Homo Sapiens
  misc_feature (262)..(262): Xaa can be any naturally occurring amino acid
MWDLVLSIALSVGCTGAVPLIQSRIVGGWECEKHSQPWQVAVYSHGWAHCGGVLVHPQWVLTAAHCLKKNSQVWLGRHNLFEPEDTGQRVPVSHSFPHPLYNMSLLKHQSLRPDEDSSHDLMLLRLSEPAKITDVVKVLGLPTQEPALGTTCYASGWGSIEPEEFLRPRSLQCVSLHLLSNDMCARAYSEKVTEFMLCAGLWTGGKDTCGGDSGGPLVCNGVLQGITSWGPEPCALPEKPAVYTKVVHYRKWIKDTIAANPXVPLSHPYL

SEQ ID NO: 417 - protein, 445 aa, Homo Sapiens
  misc_feature (255)..(255): Xaa can be any naturally occurring amino acid
MATAGNPWGWFLGYLILGVAGSLVSGSCSQIINGEDCSPHSQPWQAALVMENELFCSGVLVHPQWVLSAAHCFQNSYTIGLGLHSLEADQEPGSQMVEASLSVRHPEYNRPLLANDLMLIKLDESVSESDTIRSISIASQCPTAGNSCLVSGWGLLANGRMPTVLQCVNVSVVSEEVCSKLYDPLYHPSMFCAGGGHDQKDSCNGDSGGPLICNGYLQGLVSFGKAPCGQVGVPGVYTNLCKFTEWIEKTVQASXLWGLGTHEIDPQIHPAEGIQEYLFPAPPPSGPGVQAPSPSSLKPRVQIPSPSSLRPRSPDPPAPPPSDPGVQPLLPQTQESRPPSPSSLRPRSPAPPPSDPGVQTPQPLLPQTQGSRPPTPPPSDSEVQAPNPSFPRPRGPGPSPSSLRPSGPMPPRLSLYTVPPCGTLTQPYQLVFHFLSLSPRSRNKV

SEQ ID NO: 418 - protein, 353 aa, Homo Sapiens
  misc_feature (294)..(294): Xaa can be any naturally occurring amino acid
MATARPPWMWVLCALITALLLGVTEHVLANNDVSCDHPSNTVPSGSNQDLGAGAGEDARSDDSSSRIINGSDCDMHTQPWQAALLLRPNQLYCGAVLVHPQWLLTAAHCRKKVFRVRLGHYSLSPVYESGQQMFQGVKSIPHPGYSHPGHSNDLMLIKLNRRIRPTKDVRPINVSSHCPSAGTKCLVSGWGTTKSPQVHFPKVLQCLNISVLSQKRCEDAYPRQIDDTMFCAGDKAGRDSCQGDSGGPVVCNGSLQGLVSWGDYPCARPNRPGVYTNLCKFTKWIQETIQANSXVIPGLSTPASPPAAGTALTLLSDPHSFPEMLRMFISPAPDPMSPGLRVCFPHIGLTVSL

SEQ ID NO: 419 - protein, 271 aa, Homo Sapiens
  misc_feature (254)..(254): Xaa can be any naturally occurring amino acid
MARSLLLPLQILLLSLALETAGEEAQGDKIIDGAPCARGSHPWQVALLSGNQLHCGGVLVNERWVLTAAHCKMNEYTVHLGSDTLGDRRAQRIKASKSFRHPGYSTQTHVNDLMLVKLNSQARLSSMVKKVRLPSRCEPPGTTCTVSGWGTTTSPDVTFPSDLMCVDVKLISPQDCTKVYKDLLENSMLCAGIPDSKKNACNGDSGGPLVCRGTLQGLVSWGTFPCGQPNDPGVYTQVCKFTKWINDTMKKHRXRHTELINCVLPTENAQE

SEQ ID NO: 420 - protein, 289 aa, Homo Sapiens
  misc_feature (251)..(251): Xaa can be any naturally occurring amino acid
MKLGLLCALLSLLAGHGWADTRAIGAEECRPNSQPWQAGLFHLTRLFCGATLISDRWLLTAAHCRKPYLWVRLGEHHLWKWEGPEQLFRVTDFFPHPGFNKDLSANDHNDDIMLIRLPRQARLSPAVQPLNLSQTCVSPGMQCLISGWGAVSSPKALFPVTLQCANISILENKLCHWAYPGHISDSMLCAGLWEGGRGSCQGDSGGPLVCNGTLAGVVSGGAEPCSRPRRPAVYTSVCHYLDWIQEIMENXARAPRGHLGRPREAEGHGVGGSRRVPASMVPALDLQLP

SEQ ID NO: 421 - protein, 193 aa, Homo Sapiens
  misc_feature (190)..(190): Xaa can be any naturally occurring amino acid
MTEYKLVVVGAGGVGKSALTIQLIQNHFVDEYDPTIEDSYRKQVVIDGETCLLDILDTAGQEEYSAMRDQYMRTGEGFLCVFAINNTKSFEDIHHYREQIKRVKDSEDVPMVLVGNKCDLPSRTVDTKQAQDLARSYGIPFIETSAKTRQRVEDAFYTLVREIRQYRLKKISKEEKTPGCVKIKKCIIMXSGC

SEQ ID NO: 422 - protein, 521 aa, Homo Sapiens
  misc_feature (473)..(473): Xaa can be any naturally occurring amino acid
MTTCSRQFTSSSSMKGSCGIGGGIGGGSSRISSVLAGGSCRAPSTYGGGLSVSSSRFSSGGAYGLGGGYGGGFSSSSSSFGSGFGGGYGGGLGAGLGGGFGGGFAGGDGLLVGSEKVTMQNLNDRLASYLDKVRALEEANADLEVKIRDWYQRQRPAEIKDYSPYFKTIEDLRNKILTATVDNANVLLQIDNARLAADDFRTKYETELNLRMSVEADINGLRRVLDELTLARADLEMQIESLKEELAYLKKNHEEEMNALRGQVGGDVNVEMDAAPGVDLSRILNEMRDQYEKMAEKNRKDAEEWFFTKTEELNREVATNSELVQSGKSEISELRRTMQNLEIELQSQLSMKASLENSLEETKGRYCMQLAQIQEMIGSVEEQLAQLRCEMEQQNQEYKILLDVKTRLEQEIATYRRLLEGEDAHLSSSQFSSGSQSSRDVTSSSRQIRTKVMDVHDGKVVSTHEQVLRTKNXGCPAPLRPRRPPVWTQIPLEDPLSCPSTSQLDPASPSPPPGNQYSFII

SEQ ID NO: 423 - protein, 494 aa, Homo Sapiens
  misc_feature (457)..(457): Xaa can be any naturally occurring amino acid
MTTTFLQTSSSTFGGGSTRGGSLLAGGGGFGGGSLSGGGGSRSISASSARFVSSGSGGGYGGGMRVCGFGGGAGSVFGGGFGGGVGGGFGGGFGGGDGGLLSGNEKITMQNLNDRLASYLDKVRALEEANADLEVKIHDWYQKQTPTSPECDYSQYFKTIEELRDKIMATTIDNSRVILEIDNARLAADDFRLKYENELALRQGVEADINGLRRVLDELTLARTDLEMQIEGLNEELAYLKKNHEEEMKEFSSQLAGQVNVEMDAAPGVDLTRVLAEMREQYEAMAEKNRRDVEAWFFSKTEELNKEVASNTEMIQTSKTEITDLRRTMQELEIELQSQLSMKAGLENSLAETECRYATQLQQIQGLIGGLEAQLSELRCEMEAQNQEYKMLLDIKTRLEQEIATYRSLLEGQDAKMAGIGIREASSGGGGSSSNFHINVEESVDGQVVSSHKREIXVSIAGETSLATPHSHQAKWRTGQRACTCKLQSLPSES

SEQ ID NO: 424 - protein, 184 aa, Homo Sapiens
  misc_feature (143)..(143): Xaa can be any naturally occurring amino acid
MRFFVPLFLVGILFPAILAKQFTKCELSQLLKDIDGYGGIALPELICTMFHTSGYDTQAIVENNESTEYGLFQISNKLWCKSSQVPQSRNICDISCDKFLDDDITDDIMCAKKILDIKGIDYWLAHKALCTEKLEQWLCEKLXVSAVLGTPAHSTLLEYLFPNATSVCFFLFPQSLSVSEPWAL

SEQ ID NO: 425 - protein, 343 aa, Homo Sapiens
  misc_feature (333)..(333): Xaa can be any naturally occurring amino acid
MATLKDQLIYNLLKEEQTPQNKITVVGVGAVGMACAISILMKDLADELALVDVIEDKLKGEMMDLQHGSLFLRTPKIVSGKDYNVTANSKLVIITAGARQQEGESRLNLVQRNVNIFKFIIPNVVKYSPNCKLLIVSNPVDILTYVAWKISGFPKNRVIGSGCNLDSARFRYLMGERLGVHPLSCHGWVLGEHGDSSVPVWSGMNVAGVSLKTLHPDLGTDKDKEQWKEVHKQVVESAYEVIKLKGYTSWAIGLSVADLAESIMKNLRRVHPVSTMIKGLYGIKDDVFLSVPCILGQNGISDLVKVTLTSEEEARLKKSADTLWGIQKELQFXSLLMSYHFTV

SEQ ID NO: 426 - protein, 291 aa, Homo Sapiens
  misc_feature (251)..(251): Xaa can be any naturally occurring amino acid
MADNFSLHDALSGSGNPNPQGWPGAWGNQPAGAGGYPGASYPGAYPGQAPPGAYPGQAPPGAYPGAPGAYPGAPAPGVYPGPPSGPGAYPSSGQPSATGAYPATGPYGAPAGPLIVPYNLPLPGGVVPRMLITILGTVKPNANRIALDFQRGNDVAFHFNPRFNENNRRVIVCNTKLDNNWGREERQSVFPFESGKPFKIQVLVEPDHFKVAVNDAHLLQYNHRVKKLNEISKLGISGDIDLTSASYTMIXSERGRLKKKKESKPYMCKGFMFTVSENFYIHQYPSCKSST

SEQ ID NO: 427 - protein, 343 aa, Homo Sapiens
  misc_feature (324)..(324): Xaa can be any naturally occurring amino acid
MAYVPAPGYQPTYNPTLPYYQPIPGGLNVGMSVYIQGVASEHMKRFFVNFVVGQDPGSDVAFHFNPRFDGWDKVVFNTLQGGKWGSEERKRSMPFKKGAAFELVFIVLAEHYKVVVNGNPFYEYGHRLPLQMVTHLQVDGDLQLQSINFIGGQPLRPQGPPMMPPYPGPGHCHQQLNSLPTMEGPPTFNPPVPYFGRLQGGLTARRTIIIKGYVPPTGKSFAINFKVGSSGDIALHINPRMGNGTVVRNSLLNGSWGSEEKKITHNPFGPGQFFDLSIRCGLDRFKVYANGQHLFDFAHRLSAFQRVDTLEIQGDVTLSYVQIXSIPGAITHGKTELSPRTPF

SEQ ID NO: 428 - protein, 580 aa, Homo Sapiens
  misc_feature (558)..(558): Xaa can be any naturally occurring amino acid
MESERSKRMGNACIPLKRIAYFLCLLSALLLTEGKKPAKPKCPAVCTCTKDNALCENARSIPRTVPPDVISLSFVRSGFTEISEGSFLFTPSLQLLLFTSNSFDVISDDAFIGLPHLEYLFIENNNIKSISRHTFRGLKSLIHLSLANNNLQTLPKDIFKGLDSLTNVDLRGNSFNCDCKLKWLVEWLGHTNATVEDIYCEGPPEYKKRKINSLSSKDFDCIITEFAKSQDLPYQSLSIDTFSYLNDEYVVIAQPFTGKCIFLEWDHVEKTFRNYDNITGTSTVVCKPIVIETQLYVIVAQLFGGSHIYKRDSFANKFIKIQDIEILKIRKPNDIETFKIENNWYFVVADSSKAGFTTIYKWNGNGFYSHQSLHAWYRDTDVEYLEIVRTPQTLRTPHLILSSSSQRPVIYQWNKATQLFTNQTDIPNMEDVYAVKHFSVKGDVYICLTRFIGDSKVMKWGGSSFQDIQRMPSRGSMVFQPLQINNYQYAILGSDYSFTQVYNWDAEKAKFVKFQELNVQAPRSFTHVSINKRNFLFASSFKGNTQIYKHVIVDLSAXDTKFCGCHQKFSTVHDPDELNA

SEQ ID NO: 429 - protein, 444 aa, Homo Sapiens
  misc_feature (434)..(434): Xaa can be any naturally occurring amino acid
MVWKVAVFLSVALGIGAVPIDDPEDGGKHWVVIVAGSNGWYNYRHQADACHAYQIIHRNGIPDEQIVVMMYDDIAYSEDNPTPGIVINRPNGTDVYQGVPKDYTGEDVTPQNFLAVLRGDAEAVKGIGSGKVLKSGPQDHVFIYFTDHGSTGILVFPNEDLHVKDLNETIHYMYKHKMYRKMVFYIEACESGSMMNHLPDNINVYATTAANPRESSYACYYDEKRSTYLGDWYSVNWMEDSDVEDLTKETLHKQYHLVKSHTNTSHVMQYGNKTISTMKVMQFQGMKRKASSPVPLPPVTHLDLTPSPDVPLTIMKRKLMNTNDLEESRQLTEEIQRHLDARHLIEKSVRKIVSLLAASEAEVEQLLSERAPLTGHSCYPEALLHFRTHCFNWHSPTYEYALRHLYVLVNLCEKPYPLHRIKLSMDHVCLGHYXRAASWKLFQV

SEQ ID NO: 430 - protein, 421 aa, Homo Sapiens
  misc_feature (407)..(407): Xaa can be any naturally occurring amino acid
MVHCAGCKRPILDRFLLNVLDRAWHVKCVQCCECKCNLTEKCFSREGKLYCKNDFFRCFGTKCAGCAQGISPSDLVRRARSKVFHLNCFTCMMCNKQLSTGEELYIIDENKFVCKEDYLSNSSVAKENSLHSATTGSDPSLSPDSQDPSQDDAKDSESANVSDKEAGSNENDDQNLGAKRRGPRTTIKAKQLETLKAAFAATPKPTRHIREQLAQETGLNMRVIQVWFQNRRSKERRMKQLSALGARRHAFFRSPRRMRPLVDRLEPGELIPNGPFSFYGDYQSEYYGPGGNYDFFPQGPPSSQAQTPVDLPFVPSSGPSGTPLGGLEHPLPGHHPSSEAQRFTDILAHPPGDSPSPEPSLPGPLHSMSAEVFGPSPPFSSLSVNGGASYGNHLSHPPEMNEAAVWXRGLARSAEFVVVQK

SEQ ID NO: 431 - protein, 761 aa, Homo Sapiens
  misc_feature (665)..(665): Xaa can be any naturally occurring amino acid
METPSQRRATRSGAQASSTPLSPTRITRLQEKEDLQELNDRLAVYIDRVRSLETENAGLRLRITESEEVVSREVSGIKAAYEAELGDARKTLDSVAKERARLQLELSKVREEFKELKARNTKKEGDLIAAQARLKDLEALLNSKEAALSTALSEKRTLEGELHDLRGQVAKLEAALGEAKKQLQDEMLRRVDAENRLQTMKEELDFQKNIYSEELRETKRRHETRLVEIDNGKQREFESRLADALQELRAQHEDQVEQYKKELEKTYSAKLDNARQSAERNSNLVGAAHEELQQSRIRIDSLSAQLSQLQKQLAAKEAKLRDLEDSLARERDTSRRLLAEKEREMAEMRARMQQQLDEYQELLDIKLALDMEIHAYRKLLEGEEERLRLSPSPTSQRSRGRASSHSSQTQGGGSVTKKRKLESTESRSSFSQHARTSGRVAVEEVDEEGKFVRLRNKSNEDQSMGNWQIKRQNGDDPLLTYRFPPKFTLKAGQVVTIWAAGAGATHSPPTDLVWKAQNTWGCGNSLRTALINSTGEEVAMRKLVRSVTVVEDDEDEDGDDLLHHHHGSHCSSSGDPAEYNLRSRTVLCGTCGQPADKASASGSGAQVGGPISSGSSASSVTVTRSYRSVGGSGGGSFGDNLVTRSYLLGNSSPRTQSPQNCSIMXSGTCQAGVGVEASCVLLTSCPPPALHVMGGGLKPKKNNPLVFFFCIFFSKRSYFLQWFYTEGKTQAKKKKSIYLIYLNPNFSSLPFPCFQETPHLP

SEQ ID NO: 432 - protein, 193 aa, Homo Sapiens; identical to SEQ ID NO: 229
  misc_feature (188)..(188): Xaa can be any naturally occurring amino acid

SEQ ID NO: 433 - protein, 272 aa, Homo Sapiens; identical to SEQ ID NO: 61
  misc_feature (253)..(253): Xaa can be any naturally occurring amino acid

SEQ ID NO: 434 - protein, 205 aa, Homo Sapiens
  misc_feature (189)..(189): Xaa can be any naturally occurring amino acid
MNGDDAFARRPTVGAQIPEKIQKAFDDIAKYFSKEEWEKMKASEKIFYVYMKRKYEAMTKLGFKATLPPFMCNKRAEDFQGNDLDNDPNRGNQVERPQMTFGRLQGISPKIMPKKPAEEGNDSEEVPEASGPQNDGKELCPPGKPTTSEKIHERSGPKRGEHAWTHRLRERKQLVIYEEISDPEEDDEXLPSGIRHMPMMRSRTW

SEQ ID NO: 435 - protein, 129 aa, Homo Sapiens; identical to SEQ ID NO: 227
  misc_feature (95)..(95): Xaa can be any naturally occurring amino acid

SEQ ID NO: 436 - protein, 191 aa, Homo Sapiens; identical to SEQ ID NO: 281
  misc_feature (136)..(136): Xaa can be any naturally occurring amino acid

SEQ ID NO: 437 - protein, 4611 aa, Homo Sapiens
  misc_feature (4600)..(4600): Xaa can be any naturally occurring amino acid
MSEFLLALLTLSGLLPIARVLTVGADRDQQLCDPGEFLCHDHVTCVSQSWLCDGDPDCPDDSDESLDTCPEEVEIKCPLNHIACLGTNKCVHLSQLCNGVLDCPDGYDEGVHCQELLSNCQQLNCQYKCTMVRNSTRCYCEDGFEITEDGRSCKDQDECAVYGTCSQTCRNTHGSYTCSCVEGYLMQPDNRSCKAKIEPTDRPPILLIANFETIEVFYLNGSKMATLSSVNGNEIHTLDFIYNEDMICWIESRESSNQLKCIQITKAGGLTDEWTINILQSFHNVQQMAIDWLTRNLYFVDHVGDRIFVCNSNGSVCVTLIDLELHNPKAIAVDPIAGKLFFTDYGNVAKVERCDMDGMNRTRIIDSKTEQPAALALDLVNKLVYWVDLYLDYVGVVDYQGKNRHTVIQGRQVRHLYGITVFEDYLYATNSDNYNIVRINRFNGTDIHSLIKIENAWGIRIYQKRTQPTVRSHACEVDPYGMPGGCSHICLLSSSYKTRTCRCRTGFNLGSDGRSCKRPKNELFLFYGKGRPGIVRGMDLNTKIADEYMIPIENLVNPRALDFHAETNYIYFADTTSFLIGRQKIDGTERETILKDDLDNVEGIAVDWIGNNLYWTNDGHRKTINVARLEKASQSRKTLLEGEMSHPRGIVVDPVNGWMYWTDWEEDEIDDSVGRIEKAWMDGFNRQIFVTSKMLWPNGLTLDFHTNTLYWCDAYYDHIEKVFLNGTHRKIVYSGRELNHPFGLSHHGNYVFWTDYMNGSIFQLDLITSEVTLLRHERPPLFGLQIYDPRKQQGDNMCRVNNGGCSTLCLAIPGGRVCACADNQLLDENGTTCTFNPGEALPHICKAGEFRCKNRHCIQARWKCDGDDDCLDGSDEDSVNCFNHSCPDDQFKCQNNRCIPKRWLCDGANDCGSNEDESNQTCTARTCQVDQFSCGNGRCIPRAWLCDREDDCGDQTDEMASCEFPTCEPLTQFVCKSGRCISSKWHCDSDDDCGDGSDEVGCVHSCFDNQFRCSSGRCIPGHWACDGDNDCGDFSDEAQINCTKEEIHSPAGCNGNEFQCHPDGNCVPDLWRCDGEKDCEDGSDEKGCNGTIRLCDHKTKFSCWSTGRCINKAWVCDGDIDCEDQSDEDDCDSFLCGPPKHPCANDTSVCLQPEKLCNGKKDCPDGSDEGYLCDECSLNNGGCSNHCSVVPGRGIVCSCPEGLQLNKDNKTCEIVDYCSNHLKCSQVCEQHKHTVKCSCYEGWKLDVDGESCTSVDPFEAFIIFSIRHEIRRIDLHKRDYSLLVPGLRNTIALDFHFNQSLLYWTDVVEDRIYRGKLSESGGVSAIEVVVEHGLATPEGLTVDWIAGNIYWIDSNLDQIEVAKLDGSLRTTLIAGAMEHPRAIALDPRYGILFWTDWDANFPRIESASMSGAGRKTIYKDMKTGAWPNGLTVDHFEKRIVWTDARSDAIYSALYDGTNMIEIIRGHEYLSHPFAVSLYGSEVYWTDWRTNTLSKANKWTGQNVSVIQKTSAQPFDLQIYHPSRQPQAPNPCAANDGKGPCSHMCLINHNRSAACACPHLMKLSSDKKTCYEMKKFLLYARRSEIRGVDIDNPYFNFITAFTVPDIDDVTVIDFDASEERLYWTDIKTQTIKRAFINGTGLETVISRDIQSIRGLAVDWVSRNLYWISSEFDETQINVARLDGSLKTSIIHGIDKPQCLAAHPVRGKLYWTDGNTINMANMDGSNSKILFQNQKEPVGLSIDYVENKLYWISSGNGTINRCNLDGGNLEVIESMKEELTKATALTIMDKKLWWADQNLAQLGTCSKRDGRNPTILRNKTSGVVHMKVYDKEAQQGSNSCQLNNGGCSQLCLPTSETTRTCMCTVGYYLQKNRMSCQGIESFLMYSVHEGIRGIPLEPSDKMDALMPISGTSFAVGIDFHAENDTIYWTDMGFNKISRAKRDQTWKEDIITNGLGRVEGIAVDWIAGNIYWTDHGFNLIEVARLNGSFRYVIISQGLDQPRSIAVHPEKGLLFWTEWGQMPCIGKARLDGSEKVVLVSMGIAWPNGISIDYEENKLYWCDARTDKIERIDLETGGNREMVLSGSNVDMFSVAVFGAYIYWSDRAHANGSVRRGHKNDATETITMRTGLGVNLKEVKIFNRVREKGTNVCARDNGGCKQLCLYRGNSRRTCACAHGYLAEDGVTCLRHEGYLLYSGRTILKSIHLSDETNLNSPIRPYENPRYFKNVIALAFDYNQRRKGTNRIFYSDAHFGNIQLIKDNWEDRQVIVENVGSVEGLAYHRAWDTLYWTSSTTSSITRHTVDQTRPGAFDREAVITMSEDDHPHVLALDECQNLMFWTNWNEQHPSIMRSTLTGKNAQVVVSTDILTPNGLTIDYRAEKLYFSDGSLGKIERCEYDGSQRHVIVKSGPGTFLSLAVYDNYIFWSDWGRRAILRSNKYTGGDTKILRSDIPHQPMGIIAVANDTNSCELSPCALLNGGCHDLCLLTPNGRVNCSCRGDRILLEDNRCVTKNSSCNAYSEFECGNGECIDYQLTCDGIPHCKDKSDEKLLYCENRSCRRGFKPCYNRRCIPHGKLCDGENDCGDNSDELDCKVSTCATVEFRCADGTCIPRSARCNQNIDCADASDEKNCNNTDCTHFYKLGVKTTGFIRCNSTSLCVLPTWICDGSNDCGDYSDELKCPVQNKHKCEENYFSCPSGRCILNTWICDGQKDCEDGRDEFHCDSSCSWNQFACSAQKCISKHWICDGEDDCGDGLDESDSICGAITCAADMFSCQGSRACVPRHWLCDGERDCPDGSDELSTAGCAPNNTCDENAFMCHNKVCIPKQFVCDHDDDCGDGSDESPQCGYRQCGTEEFSCADGRCLLNTQWQCDGDFDCPDHSDEAPLNPKCKSAEQSCNSSFFMCKNGRCIPSGGLCDNKDDCGDGSDERNCHINECLSKKVSGCSQDCQDLPVSYKCKCWPGFQLKDDGKTCVDIDECSSGFPCSQQCINTYGTYKCLCTDGYEIQPDNPNGCKSLSDEEPFLILADHHEIRKISTDGSNYTLLKQGLNNVIAIDFDYREEFIYWIDSSRPNGSRINRMCLNGSDIKVVHNTAVPNALAVDWIGKNLYWSDTEKRIIEVSKLNGLYPTILVSKRLKFPRDLSLDPQAGYLYWIDCCEYPHIGRVGMDGTNQSVVIETKISRPMALTIDYVNRRLYWADENHIEFSNMDGSHRHKVPNQDIPGVIALTLFEDYIYWTDGKTKSLSRAHKTSGADRLSLIYSWHAITDIQVYHSYRQPDVSKHLCMINNGGCSHLCLLAPGKTHTCACPTNFYLAADNRTCLSNCTASQFRCKTDKCIPFWWKCDTVDDCGDGSDEPDDCPEFRCQPGRFQCGTGLCALPAFICDGENDCGDNSDELNCDTHVCLSGQFKCTKNQKCIPVNLRCNGQDDCGDEEDERDCPENSCSPDYFQCKTTKHCISKLWVCDEDPDCADASDEANCDKKTCGPHEFQCKNNNCIPDHWRCDSQNDCSDNSDEENCKPQTCTLKDFLCANGDCVSSRFWCDGDFDCADGSDERNCETSCSKDQFRCSNGQCIPAKWKCDGHEDCKYGEDEKSCEPASPTCSSREYICASDGCISASLKCNGEYDCADGSDEMDCVTECKEDQFRCKNKAHCIPIRWLCDGIHDCVDGSDEENCERGGNICRADEFLCNNSLCKLHFWVCDGEDDCGDNSDEAPDMCVKFLCPSTRPHRCRNNRICLQSEQMCNGIDECGDNSDEDHCGGKLTYKARPCKKDEFACSNKKCIPMDLQCDRLDDCGDGSDEQGCRIAPTEYTCEDNVNPCGDDAYCNQIKTSVFCRCKPGFQRNMKNRQCEDLNECLVFGTCSHQCINVEGSYKCVCDQNFQERNNTCIAEGSEDQVLYIANDTDILGFIYPFNYSGDHQQISHIEHNSRITGMDVYYQRDMIIWSTQFNPGGIFYKRIHGREKRQANSGLICPEFKRPRDIAVDWVAGNIYWTDHSRMHWFSYYTTHWTSLRYSINVGQLNGPNCTRLLTNMAGEPYAIAVNPKRGMMYWTVVGDHSHIEEAAMDGTLRRILVQKNLQRPTGLAVDYFSERIYWADFELSIIGSVLYDGSNSVVSVSSKQGLLHPHRIDIFEDYIYGAGPKNGVFRVQKFGHGSVEYLALNIDKTKGVLISHRYKQLDLPNPCLDLACEFLCLLNPSGATCVCPEGKYLINGTCNDDSLLDDSCKLTCENGGRCILNEKGDLRCHCWPSYSGERCEVNHCSNYCQNGGTCVPSVLGRPTCSCALGFTGPNCGKTVCEDFCQNGGTCIVTAGNQPYCHCQPEYTGDRCQYYVCHHYCVNSESCTIGDDGSVECVCPTRYEGPKCEVDKCVRCHGGHCIINKDSEDIFCNCTNGKIASSCQLCDGYCYNGGTCQLDPETNVPVCLCSTNWSGTQCERPAPKSSKSDHISTRSIAIIVPLVLLVTLITTLVIGLVLCKRKRRTKTIRRQPIINGGINVEIGNPSYNMYEVDHDHNDGGLLDPGFMIDPTKARYIGGGPSAFKLPHTAPPIYLNSDLKGPLTAGPTNYSNPVYAKLYMDGQNCRNSLGSVDERKELLPKKIEIGIRETVAXSVISFICCINV

SEQ ID NO: 438 - protein, 215 aa, Homo Sapiens
  misc_feature (206)..(206): Xaa can be any naturally occurring amino acid
MTPPERLFLPRVCGTTLHLLLLGLLLVLLPGAQGLPGVGLTPSAAQTARQHPKMHLAHSTLKPAAHLIGDPSKQNSLLWRANTDRAFLQDGFSLSNNSLLVPTSGIYFVYSQVVFSGKAYSPKATSSPLYLAHEVQLFSSQYPFHVPLLSSQKMVYPGLQEPWLHSMYHGAAFQLTQGDQLSTHTDGIPHLVLSPSTVFFGAFALXNLEKSRKKK

SEQ ID NO: 439 - protein, 616 aa, Homo Sapiens
  misc_feature (612)..(612): Xaa can be any naturally occurring amino acid
MPEIVDTCSLASPASVCRTKHLHLRCSVDFTRRTLTGTAALTVQSQEDNLRSLVLDTKDLTIEKVVINGQEVKYALGERQSYKGSPMEISLPIALSKNQEIVIEISFETSPKSSALQWLTPEQTSGKEHPYLFSQCQAIHCRAILPCQDTPSVKLTYTAEVSVPKELVALMSAIRDGETPDPEDPSRKIYKFIQKVPIPCYLIALVVGALESRQIGPRTLVWSEKEQVEKSAYEFSETESMLKIAEDLGGPYVWGQYDLLVLPPSFPYGGMENPCLTFVTPTLLAGDKSLSNVIAHEISHSWTGNLVTNKTWDHFWLNEGHTVYLERHICGRLFGEKFRHFNALGGWGELQNSVKTFGETHPFTKLVVDLTDIDPDVAYSSVPYEKGFALLFYLEQLLGGPEIFLGFLKAYVEKFSYKSITTDDWKDFLYSYFKDKVDVLNQVDWNAWLYSPGLPPIKPNYDMTLTNACIALSQRWITAKEDDLNSFNATDLKDLSSHQLNEFLAQTLQRAPLPLGHIKRMQEVYNFNAINNSEIRFRWLRLCIQSKWEDAIPLALKMATEQGRMKFTRPLFKDLAAFDKSHDQAVRTYQEHKASMHPVTAMLVGKDLKVDXRPAY

SEQ ID NO: 440 - protein, 271 aa, Homo Sapiens
  misc_feature (245)..(245): Xaa can be any naturally occurring amino acid
MGALGLEGRGGRLQGRGSLLLAVAGATSLVTLLLAVPITVLAVLALVPQDQGGLVTETADPGAQAQQGLGFQKLPEEEPETDLSPGLPAAHLIGAPLKGQGLGWETTKEQAFLTSGTQFSDAEGLALPQDGLYYLYCLVGYRGRAPPGGGDPQGRSVTLRSSLYRAGGAYGPGTPELLLEGAETVTPVLDPARRQGYGPLWYTSVGFGGLVQLRRGERVYVNISHPDMVDFARGKTFFGAVMVGXGNMSAWCECVNIGGPDAQDPMAVGKM

SEQ ID NO: 441 - protein, 81 aa, Homo Sapiens
  misc_feature (78)..(78): Xaa can be any naturally occurring amino acid
MGALGLEGRGGRLQGRGSLLLAVAGATSLVTLLLAVPITVLAVLALVPQDQGGLGFRSCQRRSQKQISAPGSQLPTSXALR

SEQ ID NO: 442 - protein, 453 aa, Homo Sapiens
  misc_feature (436)..(436): Xaa can be any naturally occurring amino acid
MLLPWATSAPGLAWGPLVLGLFGLLAASQPQAVPPYASENQTCRDQEKEYYEPQHRICCSRCPPGTYVSAKCSRIRDTVCATCAENSYNEHWNYLTICQLCRPCDPVMGLEEIAPCTSKRKTQCRCQPGMFCAAWALECTHCELLSDCPPGTEAELKDEVGKGNNHCVPCKAGHFQNTSSPSARCQPHTRCENQGLVEAAPGTAQSDTTCKNPLEPLPPEMSGTMLMLAVLLPLAFFLLLATVFSCIWKSHPSLCRKLGSLLKRRPQGEGPNPVAGSWEPPKAHPYFPDLVQPLLPISGDVSPVSTGLPAAPVLEAGVPQQQSPLDLTREPQLEPGEQSQVAHGTNGIHVTGGSMTITGNIYIYNGPVLGGPPGPGDLPATPEPPYPIPEEGDPGPPGLSTPHQEDGKAWHLAETEHCGATPSNRGPRNQFITHDXRSLRKGRRRGAQGHFLP

SEQ ID NO: 443 - protein, 743 aa, Homo Sapiens
  misc_feature (711)..(711): Xaa can be any naturally occurring amino acid
MKLVFLVLLFLGALGLCLAGRRRSVQWCAVSQPEATKCFQWQRNMRKVRGPPVSCIKRDSPIQCIQAIAENRADAVTLDGGFIYEAGLAPYKLRPVAAEVYGTERQPRTHYYAVAVVKKGGSFQLNELQGLKSCHTGLRRTAGWNVPIGTLRPFLNWTGPPEPIEAAVARFFSASCVPGADKGQFPNLCRLCAGTGENKCAFSSQEPYFSYSGAFKCLRDGAGDVAFIRESTVFEDLSDEAERDEYELLCPDNTRKPVDKFKDCHLARVPSHAVVARSVNGKEDAIWNLLRQAQEKFGKDKSPKFQLFGSPSGQKDLLFKDSAIGFSRVPPRIDSGLYLGSGYFTAIQNLRKSEEEVAARRARVVWCAVGEQELRKCNQWSGLSEGSVTCSSASTTEDCIALVLKGEADAMSLDGGYVYTAGKCGLVPVLAENYKSQQSSDPDPNCVDRPVEGYLAVAVVRRSDTSLTWNSVKGKKSCHTAVDRTAGWNIPMGLLFNQTGSCKFDEYFSQSCAPGSDPRSNLCALCIGDEQGENKCVPNSNERYYGYTGAFRCLAENAGDVAFVKDVTVLQNTDGNNNEAWAKDLKLADFALLCLDGKRKPVTEARSCHLAMAPNHAVVSRMDKVERLKQVLLHQQAKFGRNGSDCPDKFCLFQSETKNLLFNDNTECLARLHGKTTYEKYLGPQYVAGITNLKKCSTSPLLEACEFLRKXNRRRWPSSPRKPQPFTAPSSSPQVCWGLGLPC

SEQ ID NO: 444 - protein, 431 aa, Homo Sapiens
  misc_feature (408)..(408): Xaa can be any naturally occurring amino acid
MPRGHKSKLRTCEKRQETNGQPQGLTGPQATAEKQEESHSSSSSSRACLGDCRRSSDASIPQESQGVSPTGSPDAVVSYSKSDVAANGQDEKSPSTSRDASVPQESQGASPTGSPDAGVSGSKYDVAANGQDEKSPSTSHDVSVPQESQGASPTGSPDAGVSGSKYDVAAEGEDEESVSASQKAIIFKRLSKDAVKKKACTLAQFLQKKFEKKESILKADMLKCVRREYKPYFPQILNRTSQHLVVAFGVELKEMDSSGESYTLVSKLGLPSEGILSGDNALPKSGLLMSLLVVIFMNGNCATEEEVWEFLGLLGIYDGILHSIYGDARKIITEDLVQDKYVVYRQVCNSDPPCYEFLWGPRAYAETTKMRVLRVLADSSNTSPGLYPHLYEDALIDEVERALRLRAXGRAGTISLARVPYGAISYRSSHF

SEQ ID NO: 445 - protein, 1206 aa, Homo Sapiens
  misc_feature (1143)..(1143): Xaa can be any naturally occurring amino acid
MGDKDMPTAGMPSLLQSSSESPQSCPEGEDSQSPLQIPQSSPESDDTLYPLQSPQSRSEGEDSSDPLQRPPEGKDSQSPLQIPQSSPEGDDTQSPLQNSQSSPEGKDSLSPLEISQSPPEGEDVQSPLQNPASSFFSSALLSIFQSSPESTQSPFEGFPQSVLQIPVSAASSSTLVSIFQSSPESTQSPFEGFPQSPLQIPVSRSFSSTLLSIFQSSPERTQSTFEGFAQSPLQIPVSPSSSSTLLSLFQSFSERTQSTFEGFAQSSLQIPVSPSFSSTLVSLFQSSPERTQSTFEGFPQSPLQIPVSSSSSSTLLSLFQSSPERTHSTFEGFPQSLLQIPMTSSFSSTLLSIFQSSPESAQSTFEGFPQSPLQIPGSPSFSSTLLSLFQSSPERTHSTFEGFPQSPLQIPMTSSFSSTLLSILQSSPESAQSAFEGFPQSPLQIPVSSSFSYTLLSLFQSSPERTHSTFEGFPQSPLQIPVSSSSSSSTLLSLFQSSPECTQSTFEGFPQSPLQIPQSPPEGENTHSPLQIVPSLPEWEDSLSPHYFPQSPPQGEDSLSPHYFPQSPPQGEDSLSPHYFPQSPQGEDSLSPHYFPQSPPQGEDSMSPLYFPQSPLQGEEFQSSLQSPVSICSSSTPSSLPQSFPESSQSPPEGPVQSPLHSPQSPPEGMHSQSPLQSPESAPEGEDSLSPLQIPQSPLEGEDSLSSLHFPQSPPEWEDSLSPLHFPQFPPQGEDFQSSLQSPVSICSSSTSLSLPQSFPESPQSPPEGPAQSPLQRPVSSFFSYTLASLLQSSHESPQSPPEGPAQSPLQSPVSSFPSSTSSSLSQSSPVSSFPSSTSSSLSKSSPESPLQSPVISFSSSTSLSPFSEESSSPVDEYTSSSDTLLESDSLTDSESLIESEPLFTYTLDEKVDELARFLLLKYQVKQPITKAEMLTNVISRYTGYFPVIFRKAREFIEILFGISLREVDPDDSYVFVNTLDLTSEGCLSDEQGMSQNRLLILILSIIFIKGTYASEEVIWDVLSGIGVRAGREHFAFGEPRELLTKVWVQEHYLEYREVPNSSPPRYEFLWGPRAHSEVIKRKVVEFLAMLKNTVPITFPSSYKDALKDVEERAQAIIDTTDDSTATESASSSVMSPSFSSEXSLGQILPSEFEGGSRVSTWWRAWLRLERTQCYLHFCSIWVVMGFTCFTFGYFSNAFPINNRFK

SEQ ID NO: 446 - protein, 377 aa, Homo Sapiens
  misc_feature (374)..(374): Xaa can be any naturally occurring amino acid
MPPVPGVPFRNVDNDSPTSVELEDWVDAQHPTDEEEEEASSASSTLYLVFSPSSFSTSSSLILGGPEEEEVPSGVIPNLTESIPSSPPQGPPQGPSQSPLSSCCSSFSWSSFSEESSSQKGEDTGTCQGLPDSESSFTYTLDEKVAELVEFLLLKYEAEEPVTEAEMLMIVIKYKDYFPVILKRAREFMELLFGLALIEVGPDHFCVFANTVGLTDEGSDDEGMPENSLLIIILSVIFIKGNCASEEVIWEVLNAVGVYAGREHFVYGEPRELLTKVWVQGHYLEYREVPHSSPPYYEFLWGPRAHSESIKKKVLEFLAKLNNTVPSSFPSWYKDALKDVEERVQATIDTADDATVMASESLSVMSSNVSFSEXSLG

SEQ ID NO: 447 - protein, 844 aa, Homo Sapiens
  misc_feature (835)..(835): Xaa can be any naturally occurring amino acid
MAQKMDCGAGLLGFQNPDACRAVCHPLPQPPASTLPLSAFPTLCDPPYSQLRDPPAVLSCYCTPLGASPAPAEASVEDSALLMQTLMEAIQISEAPPTNQATAAASPQSSQPPTANEMADIQVSAAAARPKSAFKVQNATTKGPNGVYDFSQAHNAKDVPNTQPKAAFKSQNATPKGPNAAYDFSQAATTGELAANKSEMAFKAQNATTKVGPNATYNFSQSLNANDLANSRPKTPFKAWNDTTKAPTADTQTQNVNQAKMATSQADIETDPGISEPDGATAQTSADGSQAQNLESRTIIRGKRTRKINNLNVEENSSGDQRRAPLAAGTWRSAPVPVTTQNPPGAPPNVLWQTPLAWQNPSGWQNQTARQTPPARQSPPARQTPPAWQNPVAWQNPVIWPNPVIWQNPVIWPNPIVWPGPVVWPNPLAWQNPPGWQTPPGWQTPPGWQGPPDWQGPPDWPLPPDWPLPPDWPLPTDWPLPPDWIPADWPIPPDWQNLRPSPNLRPSPNSRASQNPGAAQPRDVALLQERANKLVKYLMLKDYTKVPIKRSEMLRDIIREYTDVYPEIIERACFVLEKKFGIQLKEIDKEEHLYILISTPESLAGILGTTKDTPKLGLLLVILGVIFMNGNRASEAVLWEALRKMGLRPGVRHPLLGDLRKLLTYEFVKQKYLDYRRVPNSNPPEYEFLWGLRSYHETSKMKVLRFIAEVQKRDPRDWTAQFMEAADEALDALDAAAAEAEARAEARTRMGIGDEAVSGPWSWDDIEFELLTWDEEGDFGDPWSRIPFTFWARYHQNARSRFPQTFAGPIIGPGGTASANFAANFGAIGFFWVEXDVGYCYQSQ

SEQ ID NO: 448 - protein, 788 aa, Homo Sapiens
  misc_feature (779)..(779): Xaa can be any naturally occurring amino acid
MAQKMDCGAGLLGFQAEASVEDSALLMQTLMEAIQISEAPPTNQATAAASPQSSQPPTANEMADIQVSAAAARPKSAFKVQNATTKGPNGVYDFSQAHNAKDVPNTQPKAAFKSQNATPKGPNAAYDFSQAATTGELAANKSEMAFKAQNATTKVGPNATYNFSQSLNANDLANSRPKTPFKAWNDTTKAPTADTQTQNVNQAKMATSQADIETDPGISEPDGATAQTSADGSQAQNLESRTIIRGKRTRKINNLNVEENSSGDQRRAPLAAGTWRSAPVPVTTQNPPGAPPNVLWQTPLAWQNPSGWQNQTARQTPPARQSPPARQTPPAWQNPVAWQNPVIWPNPVIWQNPVIWPNPIVWPGPVVWPNPLAWQNPPGWQTPPGWQTPPGWQGPPDWQGPPDWPLPPDWPLPPDWPLPTDWPLPPDWIPADWPIPPDWQNLRPSPNLRPSPNSRASQNPGAAQPRDVALLQERANKLVKYLMLKDYTKVPIKRSEMLRDIIREYTDVYPEIIERACFVLEKKFGIQLKEIDKEEHLYILISTPESLAGILGTTKDTPKLGLLLVILGVIFMNGNRASEAVLWEALRKMGLRPGVRHPLLGDLRKLLTYEFVKQKYLDYRRVPNSNPPEYEFLWGLRSYHETSKMKVLRFIAEVQKRDPRDWTAQFMEAADEALDALDAAAAEAEARAEARTRMGIGDEAVSGPWSWDDIEFELLTWDEEGDFGDPWSRIPFTFWARYHQNARSRFPQTFAGPIIGPGGTASANFAANFGAIGFFWVEXDVGYCYQSQ

SEQ ID NO: 449 - protein, 612 aa, Homo Sapiens
  misc_feature (607)..(607): Xaa can be any naturally occurring amino acid
MSDTSESGAGLTRFQAEASEKDSSSMMQTLLTVTQNVEVPETPKASKALEVSEDVKVSKASGVSKATEVSKTPEAREAPATQASSTTQLTDTQVLAAENKSLAADTKKQNADPQAVTMPATETKKVSHVADTKVNTKAQETEAAPSQAPADEPEPESAAAQSQENQDTRPKVKAKKARKVKHLDGEEDGSSDQSQASGTTGGRRVSKALMASMARRASRGPIAFWARRASRTRLAAWARRALLSLRSPKARRGKARRRAAKLQSSQEPEAPPPRDVALLQGRANDLVKYLLAKDQTKIPIKRSDMLKDIIKEYTDVYPEIIERAGYSLEKVFGIQLKEIDKNDHLYILLSTLEPTDAGILGTTKDSPKLGLLMVLLSIIFMNGNRSSEAVIWEVLRKLGLRPGIHHSLFGDVKKLITDEFVKQKYLDYARVPNSNPPEYEFFWGLRSYYETSKMKVLKFACKVQKKDPKEWAAQYREAMEADLKAAAEAAAEAKARAEIRARMGIGLGSENAAGPCNWDEADIGPWAKARIQAGAEAKAKAQESGSASTGASTSTNNSASASASTSGGFSAGASLTATLTFGLFAGLGGAGASTSGSSGACGFSYKXDFRYC

SEQ ID NO: 450 - protein, 429 aa, Homo Sapiens
  misc_feature (394)..(394): Xaa can be any naturally occurring amino acid
MPKKKPTPIQLNPAPDGSAVNGTSSAETNLEALQKKLEELELDEQQRKRLEAFLTQKQKVGELKDDDFEKISELGAGNGGVVFKVSHKPSGLVMARKLIHLEIKPAIRNQIIRELQVLHECNSPYIVGFYGAFYSDGEISICMEHMDGGSLDQVLKKAGRIPEQILGKVSIAVIKGLTYLREKHKIMHRDVKPSNILVNSRGEIKLCDFGVSGQLIDSMANSFVGTRSYMSPERLQGTHYSVQSDIWSMGLSLVEMAVGRYPIPPPDAKELELMFGCQVEGDAAETPPRPRTPGRPLSSYGMDSRPPMAIFELLDYIVNEPPPKLPSGVFSLEFQDFVNKCLIKNPAERADLKQLMVHAFIKRSDAEEVDFAGWLCSTIGLNQPSTPTHAAGVXVFGKQQRASPLPGGLPCRFWASFPCLSLFRCAFHL

SEQ ID NO: 451 - protein, 407 aa, Homo Sapiens
  misc_feature (400)..(400): Xaa can be any naturally occurring amino acid
MAAPSPSGGGGSGGGSGSGTPGPVGSPAPGHPAVSSMQGKRKALKLNFANPPFKSTARFTLNPNPTGVQNPHIERLRTHSIESSGKLKISPEQHWDFTAEDLKDLGEIGRGAYGSVNKMVHKPSGQIMAVKRIRSTVDEKEQKQLLMDLDVVMRSSDCPYIVQFYGALFREGDCWICMELMSTSFDKFYKYVYSVLDDVIPEEILGKITLATVKALNHLKENLKIIHRDIKPSNILLDRSGNIKLCDFGISGQLVDSIAKTRDAGCRPYMAPERIDPSASRQGYDVRSDVWSLGITLYELATGRFPYPKWNSVFDQLTQVVKGDPPQLSNSEEREFSPSFINFVNLCLTKDESKRPKYKELLKHPFILMYEERAVEVACYVCKILDQMPATPSSPMYVDXYRCYIRL

SEQ ID NO: 452 - protein, 383 aa, Homo Sapiens
  misc_feature (361)..(361): Xaa can be any naturally occurring amino acid
MAAAAAAGAGPEMVRGQVFDVGPRYTNLSYIGEGAYGMVCSAYDNVNKVRVAIKKISPFEHQTYCQRTLREIKILLRFRHENIIGINDIIRAPTIEQMKDVYIVQDLMETDLYKLLKTQHLSNDHICYFLYQILRGLKYIHSANVLHRDLKPSNLLLNTTCDLKICDFGLARVADPDHDHTGFLTEYVATRWYRAPEIMLNSKGYTKSIDIWSVGCILAEMLSNRPIFPGKHYLDQLNHILGILGSPSQEDLNCIINLKARNYLLSLPHKNKVPWNRLFPNADSKALDLLDKMLTFNPHKRIEVEQALAHPYLEQYYDPSDEPIAEAPFKFDMELDDLPKEKLKELIFEETARFQPGYRSXICQDKGSEDWTCSDIGVLLPSS

SEQ ID NO: 453 - protein, 368 aa, Homo Sapiens
  misc_feature (361)..(361): Xaa can be any naturally occurring amino acid
MAAAAAAGAGPEMVRGQVFDVGPRYTNLSYIGEGAYGMVCSAYDNVNKVRVAIKKISPFEHQTYCQRTLREIKILLRFRHENIIGINDIIRAPTIEQMKDVYIVQDLMETDLYKLLKTQHLSNDHICYFLYQILRGLKYIHSANVLHRDLKPSNLLLNTTCDLKICDFGLARVADPDHDHTGFLTEYVATRWYRAPEIMLNSKGYTKSIDIWSVGCILAEMLSNRPIFPGKHYLDQLNHILGILGSPSQEDLNCIINLKARNYLLSLPHKNKVPWNRLFPNADSKALDLLDKMLTFNPHKRIEVEQALAHPYLEQYYDPSDEPIAEAPFKFDMELDDLPKEKLKELIFEETARFQPGYRSXICQVPGV

SEQ ID NO: 454 - protein, 373 aa, Homo Sapiens
  misc_feature (361)..(361): Xaa can be any naturally occurring amino acid
MSQERPTFYRQELNKTIWEVPERYQNLSPVGSGAYGSVCAAFDTKTGLRVAVKKLSRPFQSIIHAKRTYRELRLLKHMKHENVIGLLDVFTPARSLEEFNDVYLVTHLMGADLNNIVKCQKLTDDHVQFLIYQILRGLKYIHSADIIHRDLKPSNLAVNEDCELKILDFGLARHTDDEMTGYVATRWYRAPEIMLNWMHYNQTVDIWSVGCIMAELLTGRTLFPGTDHINQLQQIMRLTGTPPAYLINRMPSHEARNYIQSLTQMPKMNFANVFIGANPLAVDLLEKMLVLDSDKRITAAQALAHAYFAQYHDPDDEPVADPYDQSFESRDLLIDEWKSLTYDEVISFVPPPLDQEEMESXAPGFCSVDPTSL

SEQ ID NO: 455 - protein, 373 aa, Homo Sapiens
  misc_feature (361)..(361): Xaa can be any naturally occurring amino acid
MSQERPTFYRQELNKTIWEVPERYQNLSPVGSGAYGSVCAAFDTKTGLRVAVKKLSRPFQSIIHAKRTYRELRLLKHMKHENVIGLLDVFTPARSLEEFNDVYLVTHLMGADLNNIVKCQKLTDDHVQFLIYQILRGLKYIHSADIIHRDLKPSNLAVNEDCELKILDFGLARHTDDEMTGYVATRWYRAPEIMLNWMHYNQTVDIWSVGCIMAELLTGRTLFPGTDHIDQLKLILRLVGTPGAELLKKISSESARNYIQSLTQMPKMNFANVFIGANPLAVDLLEKMLVLDSDKRITAAQALAHAYFAQYHDPDDEPVADPYDQSFESRDLLIDEWKSLTYDEVISFVPPPLDQEEMESXAPGFCSVDPTSL

SEQ ID NO: 456 - protein, 308 aa, Homo Sapiens
  misc_feature (298)..(298): Xaa can be any naturally occurring amino acid
MSQERPTFYRQELNKTIWEVPERYQNLSPVGSGAYGSVCAAFDTKTGLRVAVKKLSRPFQSIIHAKRTYRELRLLKHMKHENVIGLLDVFTPARSLEEFNDVYLVTHLMGADLNNIVKCQKLTDDHVQFLIYQILRGLKYIHSADIIHRDLKPSNLAVNEDCELKILDFGLARHTDDEMTGYVATRWYRAPEIMLNWMHYNQTVDIWSVGCIMAELLTGRTLFPGTDHIDQLKLILRLVGTPGAELLKKISSESARNYIQSLTQMPKMNFANVFIGANPLGKLTIYPHLMDIELVMIXIGDLKKSFSF

SEQ ID NO: 457 - protein, 313 aa, Homo Sapiens
  misc_feature (308)..(308): Xaa can be any naturally occurring amino acid
MSQERPTFYRQELNKTIWEVPERYQNLSPVGSGAYGSVCAAFDTKTGLRVAVKKLSRPFQSIIHAKRTYRELRLLKHMKHENVIGLLDVFTPARSLEEFNDVYLVTHLMGADLNNIVKCQKLTDDHVQFLIYQILRGLKYIHSADIIHRDLKPSNLAVNEDCELKILDFGLARHTDDEMTGYVATRWYRAPEIMLNWMHYNQTVDIWSVGCIMAELLTGRTLFPGTDHIDQLKLILRLVGTPGAELLKKISSESLSTCWRRCLYWTQIRELQRPKPLHMPTLLSTTILMMNQWPILMISPLKAGTSLXMSGKA

SEQ ID NO: 458 - protein, 403 aa, Homo Sapiens
  misc_feature (380)..(380): Xaa can be any naturally occurring amino acid
MAAAAAQGGGGGEPRRTEGVGPGVPGEVEMVKGQPFDVGPRYTQLQYIGEGAYGMVSSAYDHVRKTRVAIKKISPFEHQTYCQRTLREIQILLRFRHENVIGIRDILRASTLEAMRDVYIVQDLMETDLYKLLKSQQLSNDHICYFLYQILRGLKYIHSANVLHRDLKPSNLLINTTCDLKICDFGLARIADPEHDHTGFLTEYVATRWYRAPEIMLNSKGYTKSIDIWSVGCILAEMLSNRPIFPGKHYLDQLNHILGILGSPSQEDLNCIINMKARNYLQSLPSKTKVAWAKLFPKSDSKALDLLDRMLTFNPNKRITVEEALAHPYLEQYYDPTDEPVAEEPFTFAMELDDLPKERLKELIFQETARFQPGVLEAPXPRQTSLHPGAWTCLLPAPLPPDC

SEQ ID NO: 459 - protein, 847 aa, Homo Sapiens
  misc_feature (817)..(817): Xaa can be any naturally occurring amino acid
MAEPLKEEDGEDGSAEPPGPVKVEPAHTAASVAAKNLALLKARSFDVTFDVGDEYEIIETIGNGAYGVVSSARRRLTGQQVAIKKIPNAFDVVTNAKRTLRELKILKHFKHDNIIAIKDILRPTVPYGEFKSVYVVLDLMESDLHQIIHSSQPLTLEHVRYFLYQLLRGLKYMHSAQVIHRDLKPSNLLVNENCELKIGDFGMARGLCTSPAEHQYFMTEYVATRWYRAPELMLSLHEYTQAIDLWSVGCIFGEMLARRQLFPGKNYVHQLQLIMMVLGTPSPAVIQAVGAERVRAYIQSLPPRQPVPWETVYPGADRQALSLLGRMLRFEPSARISAAAALRHPFLAKYHDPDDEPDCAPPFDFAFDREALTRERIKEAIVAEIEDFHARREGIRQQIRFQPSLQPVASEPGCPDVEMPSPWAPSGDCAMESPPPAPPPCPGPAPDTIDLTLQPPPPVSEPAPPKKDGAISDNTKAALKAALLKSLRSRLRDGPSAPLEAPEPRKPVTAQERQREREEKRRRRQERAKEREKRRQERERKERGAGASGGPSTDPLAGLVLSDNDRSLLERWTRMARPAAPALTSVPAPAPAPTPTPTPVQPTSPPPGPVAQPTGPQPQSAGSTSGPVPQPACPPPGPAPHPTGPPGPIPVPAPPQIATSTSLLAAQSLVPPPGLPGSSTPGVLPYFPPGLPPPDAGGAPQSSMSESPDVNLVTQQLSKSQVEDPLPPVFSGTPKGSGAGYGVGFDLEEFLNQSFDMGVADGPQDGQADSASLSASLLADWLEGHGMNPADIESLQREIQMDSPMLLADLPDLQDPXGPQPVPCCHSRPSSRIHGSILKGFSPGPSR

SEQ ID NO: 460 - protein, 417 aa, Homo Sapiens
  misc_feature (385)..(385): Xaa can be any naturally occurring amino acid
MSRSKRDNNFYSVEIGDSTFTVLKRYQNLKPIGSGAQGIVCAAYDAILERNVAIKKLSRPFQNQTHAKRAYRELVLMKCVNHKNIIGLLNVFTPQKSLEEFQDVYIVMELMDANLCQVIQMELDHERMSYLLYQMLCGIKHLHSAGIIHRDLKPSNIVVKSDCTLKILDFGLARTAGTSFMMTPYVVTRYYRAPEVILGMGYKENVDLWSVGCIMGEMVCHKILFPGRDYIDQWNKVIEQLGTPCPEFMKKLQPTVRTYVENRPKYAGYSFEKLFPDVLFPADSEHNKLKASQARDLLSKMLVIDASKRISVDEALQHPYINVWYDPSEAEAPPPKIPDKQLDEREHTIEEWKELIYKEVMDLEERTKNGVIRGQPSPLAQVQQXSMALSIHHHRRLSMMCLQCQQIRLWPLIQTAV

SEQ ID NO: 461 - protein, 417 aa, Homo Sapiens
  misc_feature (385)..(385): Xaa can be any naturally occurring amino acid
MSRSKRDNNFYSVEIGDSTFTVLKRYQNLKPIGSGAQGIVCAAYDAILERNVAIKKLSRPFQNQTHAKRAYRELVLMKCVNHKNIIGLLNVFTPQKSLEEFQDVYIVMELMDANLCQVIQMELDHERMSYLLYQMLCGIKHLHSAGIIHRDLKPSNIVVKSDCTLKILDFGLARTAGTSFMMTPYVVTRYYRAPEVILGMGYKENVDIWSVGCIMGEMIKGGVLFPGTDHIDQWNKVIEQLGTPCPEFMKKLQPTVRTYVENRPKYAGYSFEKLFPDVLFPADSEHNKLKASQARDLLSKMLVIDASKRISVDEALQHPYINVWYDPSEAEAPPPKIPDKQLDEREHTIEEWKELIYKEVMDLEERTKNGVIRGQPSPLAQVQQXSMALSIHHHRRLSMMCLQCQQIRLWPLIQTAV

SEQ ID NO: 462 - protein, 444 aa, Homo Sapiens
  misc_feature (428)..(428): Xaa can be any naturally occurring amino acid
MSRSKRDNNFYSVEIGDSTFTVLKRYQNLKPIGSGAQGIVCAAYDAILERNVAIKKLSRPFQNQTHAKRAYRELVLMKCVNHKNIIGLLNVFTPQKSLEEFQDVYIVMELMDANLCQVIQMELDHERMSYLLYQMLCGIKHLHSAGIIHRDLKPSNIVVKSDCTLKILDFGLARTAGTSFMMTPYVVTRYYRAPEVILGMGYKENVDIWSVGCIMGEMIKGGVLFPGTDHIDQWNKVIEQLGTPCPEFMKKLQPTVRTYVENRPKYAGYSFEKLFPDVLFPADSEHNKLKASQARDLLSKMLVIDASKRISVDEALQHPYINVWYDPSEAEAPPPKIPDKQLDEREHTIEEWKELIYKEVMDLEERTKNGVIRGQPSPLGAAVINGSQHPSSSSSVNDVSSMSTDPTLASDTDSSLEAAAGPLGCCRXLLGPSGGGRDGESVSH

SEQ ID NO: 463 - protein, 444 aa, Homo Sapiens
  misc_feature (428)..(428): Xaa can be any naturally occurring amino acid
MSRSKRDNNFYSVEIGDSTFTVLKRYQNLKPIGSGAQGIVCAAYDAILERNVAIKKLSRPFQNQTHAKRAYRELVLMKCVNHKNIIGLLNVFTPQKSLEEFQDVYIVMELMDANLCQVIQMELDHERMSYLLYQMLCGIKHLHSAGIIHRDLKPSNIVVKSDCTLKILDFGLARTAGTSFMMTPYVVTRYYRAPEVILGMGYKENVDLWSVGCIMGEMVCHKILFPGRDYIDQWNKVIEQLGTPCPEFMKKLQPTVRTYVENRPKYAGYSFEKLFPDVLFPADSEHNKLKASQARDLLSKMLVIDASKRISVDEALQHPYINVWYDPSEAEAPPPKIPDKQLDEREHTIEEWKELIYKEVMDLEERTKNGVIRGQPSPLGAAVINGSQHPSSSSSVNDVSSMSTDPTLASDTDSSLEAAAGPLGCCRXLLGPSGGGRDGESVSH

SEQ ID NO: 464 - protein, 385 aa, Homo Sapiens
  misc_feature (371)..(371): Xaa can be any naturally occurring amino acid
MLSNSQGQSPPVPFPAPAPPPQPPTPALPHPPAQPPPPPPQQFPQFHVKSGLQIKKNAIIDDYKVTSQVLGLGINGKVLQIFNKRTQEKFALKMLQDCPKARREVELHWRASQCPHIVRIVDVYENLYAGRKCLLIVMECLDGGELFSRIQDRGDQAFTEREASEIMKSIGEAIQYLHSINIAHRDVKPENLLYTSKRPNAILKLTDFGFAKETTSHNSLTTPCYTPYYVAPEVLGPEKYDKSCDMWSLGVIMYILLCGYPPFYSNHGLAISPGMKTRIRMGQYEFPNPEWSEVSEEVKMLIRNLLKTEPTQRMTITEFMNHPWIMQSTKVPQTPLHTSRVLKEDKERWEDVKGCLHDKNSDQATWLTRLXAEDSVFLSKLSAVS

SEQ ID NO: 465 - protein, 413 aa, Homo Sapiens
  misc_feature (401)..(401): Xaa can be any naturally occurring amino acid
MLSNSQGQSPPVPFPAPAPPPQPPTPALPHPPAQPPPPPPQQFPQFHVKSGLQIKKNAIIDDYKVTSQVLGLGINGKVLQIFNKRTQEKFALKMLQDCPKARREVELHWRASQCPHIVRIVDVYENLYAGRKCLLIVMECLDGGELFSRIQDRGDQAFTEREASEIMKSIGEAIQYLHSINIAHRDVKPENLLYTSKRPNAILKLTDFGFAKETTSHNSLTTPCYTPYYVAPEVLGPEKYDKSCDMWSLGVIMYILLCGYPPFYSNHGLAISPGMKTRIRMGQYEFPNPEWSEVSEEVKMLIRNLLKTEPTQRMTITEFMNHPWIMQSTKVPQTPLHTSRVLKEDKERWEDVKEEMTSALATMRVDYEQIKIKKIEDASNPLLLKRRKKARALEAAALAHXATAPSCPREDKQ

SEQ ID NO: 466 - protein, 613 aa, Homo Sapiens
  misc_feature (606)..(606): Xaa can be any naturally occurring amino acid
MAEDWLDCPALGPGWKRREVFRKSGATCGRSDTYYQSPTGDRIRSKVELTRYLGPACDLTLFDFKQGILCYPAPKAHPVAVASKKRKKPSRPAKTRKRQVGPQSGEVRKEAPRDETKADTDTAPASFPAPGCCENCGISFSGDGTQRQRLKTLCKDCRAQRIAFNREQRMFKRVGCGECAACQVTEDCGACSTCLLQLPHDVASGLFCKCERRRCLRIVERSRGCGVCRGCQTQEDCGHCPICLRPPRPGLRRQWKCVQRRCLRGKHARRKGGCDSKMAARRRPGAQPLPPPPPSQSPEPTEPHPRALAPSPPAEFIYYCVDEDELQPYTNRRQNRKCGACAACLRRMDCGRCDFCCDKPKFGGSNQKRQKCRWRQCLQFAMKRLLPSVWSESEDGAGSPPPYRRRKRPSSARRHHLGPTLKPTLATRTAQPDHTQAPTKQEAGGGFVLPPPGTDLVFLREGASSPVQVPGPVAASTEALLQEAQCSGLSWVVALPQVKQEKADTQDEWTPGTAVLTSPVLVPGCPSKAVDPGLPSVKQEPPDPEEDKEENKDDSASKLAPEEEAGGAGTPVITEIFSLGGTRFRDTAVWLPRSKDLKKPGARKQXTGGFYRL

SEQ ID NO: 467 - protein, 428 aa, Homo Sapiens
  misc_feature (412)..(412): Xaa can be any naturally occurring amino acid
MRAHPGGGRCCPEQEEGESAAGGSGAGGDSAIEQGGQGSALAPSPVSGVRREGARGGGRGRGRWKQAGRGGGVCGRGRGRGRGRGRGRGRGRGRGRPPSGGSGLGGDGGGCGGGGSGGGGAPRREPVPFPSGSAGPGPRGPRATESGKRMDCPALPPGWKKEEVIRKSGLSAGKSDVYYFSPSGKKFRSKPQLARYLGNTVDLSSFDFRTGKMMPSKLQKNKQRLRNDPLNQNKGKPDLNTTLPIRQTASIFKQPVTKVTNHPSNKVKSDPQRMNEQPRQLFWEKRLQGLSASDVTEQIIKTMELPKGLQGVGPGSNDETLLSAVASALHTSSAPITGQVSAAVEKNPAVWLNTSQPLCKAFIVTDEDIRKQEERVQQVRKKLEEALMADILSRAADTEEMDIEMDSGDEAXEYDQVTFDRLSPRENS

SEQ ID NO: 468 - protein, 313 aa, Homo Sapiens
  misc_feature (303)..(303): Xaa can be any naturally occurring amino acid
MRAHPGGGRCCPEQEEGESAAGGSGAGGDSAIEQGGQGSALAPSPVSGVRREGARGGGRGRGRWKQAGRGGGVCGRGRGRGRGRGRGRGRGRGRGRPPSGGSGLGGDGGGCGGGGSGGGGAPRREPVPFPSGSAGPGPRGPRATESGKRMDCPALPPGWKKEEVIRKSGLSAGKSDVYYFSPSGKKFRSKPQLARYLGNTVDLSSFDFRTGKMMPSKLQKNKQRLRNDPLNQNKLRWNTHRPAPWHALSRLCLLIRCLLCLECAYPLPLHLVNSYSSKTQLHCLHLWEACPAYSRQNQSFPPXCFPGALPLYL

SEQ ID NO: 469 - protein, 610 aa, Homo Sapiens
  misc_feature (581)..(581): Xaa can be any naturally occurring amino acid
MGTTGLESLSLGDRGAAPTVTSSERLVPDPPNDLRKEDVAMELERVGEDEEQMMIKRSSECNPLLQEPIASAQFGATAGTECRKSVPCGWERVVKQRLFGKTAGRFDVYFISPQGLKFRSKSSLANYLHKNGETSLKPEDFDFTVLSKRGIKSRYKDCSMAALTSHLQNQSNNSNWNLRTRSKCKKDVFMPPSSSSELQESRGLSNFTSTHLLLKEDEGVDDVNFRKVRKPKGKVTILKGIPIKKTKKGCRKSCSGFVQSDSKRESVCNKADAESEPVAQKSQLDRTVCISDAGACGETLSVTSEENSLVKKKERSLSSGSNFCSEQKTSGIINKFCSAKDSEHNEKYEDTFLESEEIGTKVEVVERKEHLHTDILKRGSEMDNNCSPTRKDFTGEKIFQEDTIPRTQIERRKTSLYFSSKYNKEALSPPRRKAFKKWTPPRSPFNLVQETLFHDPWKLLIATIFLNRTSGKMAIPVLWKFLEKYPSAEVARTADWRDVSELLKPLGLYDLRAKTIVKFSDEYLTKQWKYPIELHGIGKYGNDSYRIFCVNEWKQVHPEDHKLNKYHDWLWENHEKLSLSXTLQLSSSSVMHSFALQKSLIKYNQPPFQP

SEQ ID NO: 470 - protein, 358 aa, Homo Sapiens
  misc_feature (351)..(351): Xaa can be any naturally occurring amino acid
MFGLKRNAVIGLNLYCGGAGLGAGSGGATRPGGRLLATEKEASARREIGGGEAGAVIGGSAGASPPSTLTPDSRRVARPPPIGAEVPDVTATPARLLFFAPTRRAAPLEEMEAPAADAIMSPEEELDGYEPEPLGKRPAVLPLLELVGESGNNTSTDGSLPSTPPPAEEEEDELYRQSLEIISRYLREQATGAKDTKPMGRSGATSRKALETLRRVGDGVQRNHETAFQGMLRKLDIKNEDDVKSLSRVMIHVFSDGVTNWGRIVTLISFGAFVAKHLKTINQESCIEPLAESITDVLVRTKRDWLVKQRGWDGFVEFFHVEDLEGGIRNVLLAFAGVAGVGAGLAYLIRXPYCKCNS

SEQ ID NO: 471 - protein, 981 aa, Homo Sapiens
  misc_feature (905)..(905): Xaa can be any naturally occurring amino acid
MAESSESFTMASSPAQRRRGNDPLTSSPGRSSRRTDALTSSPGRDLPPFEDESEGLLGTEGPLEEEEDGEELIGDGMERDYRAIPELDAYEAEGLALDDEDVEELTASQREAAERAMRQRDREAGRGLGRMRRGLLYDSDEEDEERPARKRRQVERATEDGEEDEEMIESIENLEDLKGHSVREWVSMAGPRLEIHHRFKNFLRTHVDSHGHNVFKERISDMCKENRESLVVNYEDLAAREHVLAYFLPEAPAELLQIFDEAALEVVLAMYPKYDRITNHIHVRISHLPLVEELRSLRQLHLNQLIRTSGVVTSCTGVLPQLSMVKYNCNKCNFVLGPFCQSQNQEVKPGSCPECQSAGPFEVNMEETIYQNYQRIRIQESPGKVAAGRLPRSKDAILLADLVDSCKPGDEIELTGIYHNNYDGSLNTANGFPVFATVILANHVAKKDNKVAVGELTDEDVKMITSLSKDQQIGEKIFASIAPSIYGHEDIKRGLALALFGGEPKNPGGKHKVRGDINVLLCGDPGTAKSQFLKYIEKVSSRAIFTTGQGASAVGLTAYVQRHPVSREWTLEAGALVLADRGVCLIDEFDKMNDQDRTSIHEAMEQQSISISKAGIVTSLQARCTVIAAANPIGGRYDPSLTFSENVDLTEPIISRFDILCVVRDTVDPVQDEMLARFVVGSHVRHHPSNKEEEGLANGSAAEPAMPNTYGVEPLPQEVLKKYIIYAKERVHPKLNQMDQDKVAKMYSDLRKESMATGSIPITVRHIESMIRMAEAHARIHLRDYVIEDDVNMAIRVMLESFIDTQKFSVMRSMRKTFARYLSFRRDNNELLLFILKQLVAEQVTYQRNRFGAQQDTIEVPEKDLVDKARQINIHNLSAFYDSELFRMNKFSHDLKRKMILQQFXGPMPSIRIPWDSGLGWSVPSVLYGHKTRALDELGVLGSGLIAGCLAAPGMTVCFSKPALCFSPLGGMPCQCVLLGC

SEQ ID NO: 472 - protein, 846 aa, Homo Sapiens
  misc_feature (809)..(809): Xaa can be any naturally occurring amino acid
MAGTVVLDDVELREAQRDYLDFLDDEEDQGIYQSKVRELISDNQYRLIVNVNDLRRKNEKRANRLLNNAFEELVAFQRALKDFVASIDATYAKQYEEFYVGLEGSFGSKHVSPRTLTSCFLSCVVCVEGIVTKCSLVRPKVVRSVHYCPATKKTIERRYSDLTTLVAFPSSSVYPTKDEENNPLETEYGLSVYKDHQTITIQEMPEKAPAGQLPRSVDVILDDDLVDKAKPGDRVQVVGTYRCLPGKKGGYTSGTFRTVLIACNVKQMSKDAQPSFSAEDIAKIKKFSKTRSKDIFDQLAKSLAPSIHGHDYVKKAILCLLLGGVERDLENGSHIRGDINILLIGDPSVAKSQLLRYVLCTAPRAIPTTGRGSSGVGLTAAVTTDQETGERRLEAGAMVLADRGVVCIDEFDKMSDMDRTAIHEVMEQGRVTIAKAGIHARLNARCSVLAAANPVYGRYDQYKTPMENIGLQDSLLSRFDLLFIMLDQMDPEQDREISDHVLRMHRYRAPGEQDGDAMPLGSAVDILATDDPNFSQEDQQDTQIYEKHDNLLHGTKKKKEKMVSAAFMKKYIHVAKIIKPVLTQESATYIAEEYSRLRSQDSMSSDTARTSPVTARTLETLIRLATAHAKARMSKTVDLQDAEEAVELVQYAYFKKVLEKEKKRKKRSEDESETEDEEEKSQEDQEQKRKRRKTRQPDAKDGDSYDPYDFSDTEEEMPQVHTPKTADSQETKESQKVELSESRLKAFKVALLDVFREAHAQSIGMNRLTESINRDSEEPFSSVEIQAALSKMQDDNQVMVSEGIIFLIXGGLVSELGLCRESLFCVSHPLPDPSLCLYSLNSVEFN

SEQ ID NO: 473 - protein, 742 aa, Homo Sapiens
  misc_feature (720)..(720): Xaa can be any naturally occurring amino acid
MALKDYALEKEKVKKFLQEFYQDDELGKKQFKYGNQLVRLAHREQVALYVDLDDVAEDDPELVDSICENARRYAKLFADAVQELLPQYKEREVVNKDVLDVYIEHRLMMEQRSRDPGMVRSPQNQYPAELMRRFELYFQGPSSNKPRVIREVRADSVGKLVTVRGIVTRVSEVKPKMVVATYTCDQCGAETYQPIQSPTFMPLIMCPSQECQTNRSGGRLYLQTRGSRFIKFQEMKMQEHSDQVPVGNIPRSITVLVEGENTRIAQPGDHVSVTGIFLPILRTGFRQVVQGLLSETYLEAHRIVKMNKSEDDESGAGELTREELRQIAEEDFYEKLAASIAPEIYGHEDVKKALLLLLVGGVDQSPRGMKIRGNINICLMGDPGVAKSQLLSYIDRLAPRSQYTTGRGSSGVGLTAAVLRDSVSGELTLEGGALVLADQGVCCIDEFDKMAEADRTAIHEVMEQQTISIAKAGILTTLNARCSILAAANPAYGRYNPRRSLEQNIQLPAALLSRFDLLWLIQDRPDRDNDLRLAQHITYVHQHSRQPPSQFEPLDMKLMRRYIAMCREKQPMVPESLADYITAAYVEMRREAWASKDATYTSARTLLAILRLSTALARLRMVDVVEKEDVNEAIRLMEMSKDSLLGDKGQTARTQRPADVIFATVRELVSGGRSVRFSEAEQRCVSRGFTPAQFQAALDEYEELNVWQVNASRTRITFVXFQPACNPGVLLFPAGLPLGKGQ

SEQ ID NO: 474 - protein, 353 aa, Homo Sapiens
  misc_feature (335)..(335): Xaa can be any naturally occurring amino acid
MSEPIRVLVTGAAGQIAYSLLYSIGNGSVFGKDQPIILVLLDITPMMGVLDGVLMELQDCALPLLKDVIATDKEDVAFKDLDVAILVGSMPRREGMERKDLLKANVKIFKSQGAALDKYAKKSVKVIVVGNPANTNCLTASKSAPSIPKENFSCLTRLDHNRAKAQIALKLGVTANDVKNVIIWGNHSSTQYPDVNHAKVKLQGKEVGVYEALKDDSWLKGEFVTTVQQRGAAVIKARKLSSAMSAAKAICDHVRDIWFGTPEGEFVSMGVISDGNSYGVPDDLLYSFPVVIKNKTWKFVEGLPINDFSREKMDLTAKELTEEKESAFEFLSSAXLDNDVTKCFKAEESKCRL

SEQ ID NO: 475 - protein, 513 aa, Homo Sapiens
  misc_feature (487)..(487): Xaa can be any naturally occurring amino acid
MVAGMLGLREEKSEDQDLQGLKDKPLKFKKVKKDKKEEKEGKHEPVQPSAHHSAEPAEAGKAETSEGSGSAPAVPEASASPKQRRSIIRDRGPMYDDPTLPEGWTRKLKQRKSGRSAGKYDVYLINPQGKAFRSKVELIAYFEKVGDTSLDPNDFDFTVTGRGSPSRREQKPPKKPKSPKAPGTGRGRGRPKGSGTTRPKAATSEGVQVKRVLEKSPGKLLVKMPFQTSPGGKAEGGGATTSTQVMVIKRPGRKRKAEADPQAIPKKRGRKPGSVVAAAAAEAKKKAVKESSIRSVQETVLPIKKRKTRETVSIEVKEVVKPLLVSTLGEKSGKGLKTCKSPGRKSKESSPKGRSSSASSPPKKEHHHHHHHSESPKAPVPLLPPLPPPPPEPESSEDPTSPPEPQDLSSSVCKEEKMPRGGSLESDGCPKEPAKTQPAVATAATAAEKYKHRGEGERKDIVSSSMPRPNREEPVDSRTPVTERVSXLYTERIAKQTNKNKGSCCLFSLWVGL

SEQ ID NO: 476 - protein, 235 aa, Homo Sapiens
  misc_feature (208)..(208): Xaa can be any naturally occurring amino acid
MDKDCEMKRTTLDSPLGKLELSGCEQGLHEIKLLGKGTSAADAVEVPAPAAVLGGPEPLMQCTAWLNAYFHQPEAIEEFPVPALHHPVFQQESFTRQVLWKLLKVVKFGEVISYQQLAALAGNPKAARAVGGAMRGNPVPILIPCHRVVCSSGAVGNYSGGLAVKEWLLAHEGHRLGKPGLGGSSGLAGAWLKGAGATSGSPPAGRNXVCAVGWMFERHTRVTLHRMRGVEAPLY

SEQ ID NO: 477 - protein, 137 aa, Homo Sapiens
  misc_feature (116)..(116): Xaa can be any naturally occurring amino acid
MPMFIVNTNVPRASVPDGFLSELTQQLAQATGKPPQYIAVHVVPDQLMAFGGSSEPCALCSLHSIGKIGGAQNRSYSKLLCGLLAERLRISPDRVYINYYDMNAANVGWNNSTFAXEPQGPTLSALAPPGNPPHAVF

SEQ ID NO: 478 - protein, 792 aa, Homo Sapiens
  misc_feature (757)..(757): Xaa can be any naturally occurring amino acid
MSFVAGVIRRLDETVVNRIAAGEVIQRPANAIKEMIENCLDAKSTSIQVIVKEGGLKLIQIQDNGTGIRKEDLDIVCERFTTSKLQSFEDLASISTYGFRGEALASISHVAHVTITTKTADGKCAYRASYSDGKLKAPPKPCAGNQGTQITVEDLFYNIATRRKALKNPSEEYGKILEVVGRYSVHNAGISFSVKKQGETVADVRTLPNASTVDNIRSIFGNAVSRELIEIGCEDKTLAFKMNGYISNANYSVKKCIFLLFINHRLVESTSLRKAIETVYAAYLPKNTHPFLYLSLEISPQNVDVNVHPTKHEVHFLHEESILERVQQHIESKLLGSNSSRMYFTQTLLPGLAGPSGEMVKSTTSLTSSSTSGSSDKVYAHQMVRTDSREQKLDAFLQPLSKPLSSQPQAIVTEDKTDISSGRARQQDEEMLELPAPAEVAAKNQSLEGDTTKGTSEMSEKRGPTSSNPRKRHREDSDVEMVEDDSRKEMTAACTPRRRIINLTSVLSLQEEINEQGHEVLREMLHNHSFVGCVNPQWALAQHQTKLYLLNTTKLSEELFYQILIYDFANFGVLRLSEPAPLFDLAMLALDSPESGWTEEDGPKEGLAEYIVEFLKKKAEMLADYFSLEIDEEGNLIGLPLLIDNYVPPLEGLPIFILRLATEVNWDEEKECFESLSKECAMFYSIRKQYISEESTLSGQQSEVPGSIPNSWKWTVEHIVYKALRSHILPPKHFTEDGNILQLANLPDLYKVFERCXIWLFMHCGMCSSFSVFRYKVLYQSVIYKVYQHKCW

SEQ ID NO: 479 - protein, 129 aa, Homo Sapiens
  misc_feature (91)..(91): Xaa can be any naturally occurring amino acid
MRDPVSSQYSSFLFWRMPIPELDLSELEGLGLSDTATYKVKDSSVGKMIGQATAADQEKNPEGDGLLEYSTFNFWRAPIASIHSFELDLLXGQDFSLPSPCPHCLPSQAPSFPLLSHFNLVLSLLCWWC

SEQ ID NO: 480 - protein, 786 aa, Homo Sapiens
  misc_feature (751)..(751): Xaa can be any naturally occurring amino acid
MGKSESQMDITDINTPKPKKKQRWTPLEISLSVLVLLLTIIAVTMIALYATYDDGICKSSDCIKSAARLIQNMDATTEPCTDFFKYACGGWLKRNVIPETSSRYGNFDILRDELEVVLKDVLQEPKTEDIVAVQKAKALYRSCINESAIDSRGGEPLLKLLPDIYGWPVATENWEQKYGASWTAEKAIAQLNSKYGKKVLINLFVGTDDKNSVNHVIHIDQPRLGLPSRDYYECTGIYKEACTAYVDFMISVARLIRQEERLPIDENQLALEMNKVMELEKEIANATAKPEDRNDPMLLYNKMTLAQIQNNFSLEINGKPFSWLNFTNEIMSTVNISITNEEDVVVYAPEYLTKLKPILTKYSARDLQNLMSWRFIMDLVSSLSRTYKESRNAFRKALYGTTSETATWRRCANYVNGNMENAVGRLYVEAAFAGESKHVVEDLIAQIREVFIQTLDDLTWMDAETKKRAEEKALAIKERIGYPDDIVSNDNKLNNEYLELNYKEDEYFENIIQNLKFSQSKQLKKLREKVDKDEWISGAAVVNAFYSSGRNQIVFPAGILQPPFFSAQQSNSLNYGGIGMVIGHEITHGFDDNGRNFNKDGDLVDWWTQQSASNFKEQSQCMVYQYGNFSWDLAGGQHLNGINTLGENIADNGGLGQAYRAYQNYIKKNGEEKLLPGLDLNHKQLFFLNFAQVWCGTYRPEYAVNSIKTDVHSPGNFRIIGTLQNSAEFSEAFHCRKNSYMNPEKKCRVWXSSKEALQPLARLANTTEMGNSLIERKWALGVTVLT

SEQ ID NO: 481 - protein, 475 aa, Homo Sapiens
  misc_feature (471)..(471): Xaa can be any naturally occurring amino acid
MKFLLILLLQATASGALPLNSSTSLEKNNVLFGERYLEKFYGLEINKLPVTKMKYSGNLMKEKIQEMQHFLGLKVTGQLDTSTLEMMHAPRCGVPDVHHFREMPGGPVWRKHYITYRINNYTPDMNREDVDYAIRKAFQVWSNVTPLKFSKINTGMADILVVFARGAHGDFHAFDGKGGILAHAFGPGSGIGGDAHFDEDEFWTTHSGGTNLFLTAVHEIGHSLGLGHSSDPKAVMFPTYKYVDINTFRLSADDIRGIQSLYGDPKENQRLPNPDNSEPALCDPNLSFDAVTTVGNKIFFFKDRFFWLKVSERPKTSVNLISSLWPTLPSGIEAAYEIEARNQVFLFKDDKYWLISNLRPEPNYPKSIHSFGFPNFVKKIDAAVFNPRFYRTYFFVDNQYWRYDERRQMMDPGYPKLITKNFQGIGPKIDAVFYSKNKYYYFFQGSNQFEYDFLLQRITKTLKSNSWFGCXKWCN

SEQ ID NO: 482 - protein, 697 aa, Homo Sapiens
  misc_feature (670)..(670): Xaa can be any naturally occurring amino acid
MGSDPSAPGRPGWTGSLLGDREEAARPRLLPLLLVLLGCLGLGVAAEDAEVHAENWLRLYGYLPQPSRHMSTMRSAQILASALAEMQRFYGIPVTGVLDEETKEWMKRPRCGVPDQFGVRVKANLRRRRKRYALTGRKWNNHHLTFSIQNYTEKLGWYHSMEAVRRAFRVWEQATPLVFQEVPYEDIRLRRQKEADIMVLFASGFHGDSSPFDGTGGFLAHAYFPGPGLGGDTHFDADEPWTFSSTDLHGNNLFLVAVHELGHALGLEHSSNPNAIMAPFYQWKDVDNFKLPEDDLRGIQQLYGTPDGQPQPTQPLPTVTPRRPGRPDHRPPRPPQPPPPGGKPERPPKPGPPVQPRATERPDQYGPNICDGDFDTVAMLRGEMFVFKGRWFWRVRHNRVLDNYPMPIGHFWRGLPGDISAAYERQDGRFVFFKGDRYWLFREANLEPGYPQPLTSYGLGIPYDRIDTAIWWEPTGHTFFFQEDRYWRFNEETQRGDPGYPKPISVWQGIPASPKGAFLSNDAAYTYFYKGTKYWKFDNERLRMEPGYPKSILRDFMGCQEHVEPGPRWPDVARPPFNPHGGAEPGADSAEGDVGDGDGDFGAGVNKDGGSRVVVQMEEVARTVNVVMVLVPLLLLLCVLGLTYALVQMQRKGAPRVLLYCKRSLQEWVXPPSAPANGAQGAPVVLRWLPGAPSAPR

SEQ ID NO: 483 - protein, 624 aa, Homo Sapiens
  misc_feature (608)..(608): Xaa can be any naturally occurring amino acid
MILLTFSTGRRLDFVHHSGVFFLQTLLWILCATVCGTEQYFNVEVWLQKYGYLPPTDPRMSVLRSAETMQSALAAMQQFYGINMTGKVDRNTIDWMKKPRCGVPDQTRGSSKFHIRRKRYALTGQKWQHKHITYSIKNVTPKVGDPETRKAIRRAFDVWQNVTPLTFEEVPYSELENGKRDVDITIIFASGFHGDSSPFDGEGGFLAHAYFPGPGIGGDTHFDSDEPWTLGNPNHDGNDLFLVAVHELGHALGLEHSNDPTAIMAPFYQYMETDNFKLPNDDLQGIQKIYGPPDKIPPPTRPLPTVPPHRSIPPADPRKNDRPKPPRPPTGRPSYPGAKPNICDGNFNTLAILRREMFVFKDQWFWRVRNNRVMDGYPMQITYFWRGLPPSIDAVYENSDGNFVFFKGNKYWVFKDTTLQPGYPHDLITLGSGIPPHGIDSAIWWEDVGKTYFFKGDRYWRYSEEMKTMDPGYPKPITVWKGIPESPQGAFVHKENGFTYFYKGKEYWKFNNQILKVEPGYPRSILKDFMGCDGPTDRVKEGHSPPDDVDIVIKLDNTASTVKAIAIVIPCILALCLLVLVYTVFQFKRKGTPRHILYCKRSMQEWVXCRVFSSFFLLQEFVVT

SEQ ID NO: 484 - protein, 290 aa, Homo Sapiens
  misc_feature (268)..(268): Xaa can be any naturally occurring amino acid
MRLTVLCAVCLLPGSLALPLPQEAGGMSELQWEQAQDYLKRFYLYDSETKNANSLEAKLKEMQKFFGLPITGMLNSRVIEIMQKPRCGVPDVAEYSLFPNSPKWTSKVVTYRIVSYTRDLPHITVDRLVSKALNMWGKEIPLHFRKVVWGTADIMIGFARGAHGDSYPFDGPGNTLAHAFAPGTGLGGDAHFDEDERWTDGSSLGINFLYAATHELGHSLGMGHSSDPNAVMYPTYGNGDPQNFKLSQDDIKGIQKLYGKRSNSRKKXKLQAEHPFIHSLDCISLLHNQN

SEQ ID NO: 485 - protein, 1389 aa, Homo Sapiens
  misc_feature (1361)..(1361): Xaa can be any naturally occurring amino acid
MSRQSTLYSFFPKSPALSDANKASARASREGGRAAAAPGASPSPGGDAAWSEAGPGPRPLARSASPPKAKNLNGGLRRSVAPAAPTSCDFSPGDLVWAKMEGYPWWPCLVYNHPFDGTFIREKGKSVRVHVQFFDDSPTRGWVSKRLLKPYTGSKSKEAQKGGHFYSAKPEILRAMQRADEALNKDKIKRLELAVCDEPSEPEEEEEMEVGTTYVTDKSEEDNEIESEEEVQPKTQGSRRSSRQIKKRRVISDSESDIGGSDVEFKPDTKEEGSSDEISSGVGDSESEGLNSPVKVARKRKRMVTGNGSLKRKSSRKETPSATKQATSISSETKNTLRAFSAPQNSESQAHVSGGGDDSSRPTVWYHETLEWLKEEKRRDEHRRRPDHPDFDASTLYVPEDFLNSCTPGMRKWWQIKSQNFDLVICYKVGKFYELYHMDALIGVSELGLVFMKGNWAHSGFPEIAFGRYSDSLVQKGYKVARVEQTETPEMMEARCRKMAHISKYDRVVRREICRIITKGTQTYSVLEGDPSENYSKYLLSLKEKEEDSSGHTRAYGVCFVDTSLGKFFIGQFSDDRHCSRFRTLVAHYPPVQVLFEKGNLSKETKTILKSSLSCSLQEGLIPGSQFWDASKTLRTLLEEEYFREKLSDGIGVMLPQVLKGMTSESDSIGLTPGEKSELALSALGGCVFYLKKCLIDQELLSMANFEEYIPLDSDTVSTTRSGAIFTKAYQRMVLDAVTLNNLEIFLNGTNGSTEGTLLERVDTCHTPFGKRLLKQWLCAPLCNHYAINDRLDAIEDLMVVPDKISEVVELLKKLPDLERLLSKIHNVGSPLKSQNHPDSRAIMYEETTYSKKKIIDFLSALEGFKVMCKIIGIMEEVADGFKSKILKQVISLQTKNPEGRFPDLTVELNRWDTAFDHEKARKTGLITPKAGFDSDYDQALADIRENEQSLLEYLEKQRNRIGCRTIVYWGIGRNRYQLEIPENFTTRNLPEEYELKSTKKGCKRYWTKTIEKKLANLINAEERRDVSLKDCMRRLFYNFDKNYKDWQSAVECIAVLDVLLCLANYSRGGDGPMCRPVILLPEDTPPFLELKGSRHPCITKTFFGDDFIPNDILIGCEEEEQENGKAYCVLVTGPNMGGKSTLMRQAGLLAVMAQMGCYVPAEVCRLTPIDRVFTRLGASDRIMSGESTFFVELSETASILMHATAHSLVLVDELGRGTATFDGTAIANAVVKELAETIKCRTLFSTHYHSLVEDYSQNVAVRLGHMACMVENECEDPSQETITFLYKFIKGACPKSYGFNAARLANLPEEVIQKGHRKAREFEKMNQSLRLFREVCLASERSTVDAEAVHKLLTLIKELXTDYIGSFELTSDKGGKFRQHYDLINFIF

SEQ ID NO: 486 - protein, 657 aa, Homo Sapiens
  misc_feature (623)..(623): Xaa can be any naturally occurring amino acid
MALPTARPLLGSCGTPALGSLLFLLFSLGWVQPSRTLAGETGQEAAPLDGVLANPPNISSLSPRQLLGFPCAEVSGLSTERVRELAVALAQKNVKLSTEQLRCLAHRLSEPPEDLDALPLDLLLFLNPDAFSGPQACTRFFSRITKANVDLLPRGAPERQRLLPAALACWGVRGSLLSEADVRALGGLACDLPGRFVAESAEVLLPRLVSCPGPLDQDQQEAARAALQGGGPPYGPPSTWSVSTMDALRGLLPVLGQPIIRSIPQGIVAAWRQRSSRDPSWRQPERTILRPRFRREVEKTACPSGKKAREIDESLIFYKKWELEACVDAALLATQMDRVNAIPFTYEQLDVLKHKLDELYPQGYPESVIQHLGYLFLKMSPEDIRKWNVTSLETLKALLEVNKGHEMSPQVATLIDRFVKGRGQLDKDTLDTLTAFYPGYLCSLSPEELSSVPPSSIWAVRPQDLDTCDPRQLDVLYPKARLAFQNMNGSEYFVKIQSFLGGAPTEDLKALSQQNVSMDLATFMKLRTDAVLPLTVAEVQKLLGPHVEGLKAEERHRPVRDWILRQRQDDLDTLGLGLQGGIPNGYLVLDLSMQEALSGTPCLLGPGPVLTVLALLLASTLAXGPHSLAGPSPAGDPRLARSRHGWSPFHPKRTRAQ

SEQ ID NO: 487 - protein, 665 aa, Homo Sapiens
  misc_feature (631)..(631): Xaa can be any naturally occurring amino acid
MALPTARPLLGSCGTPALGSLLFLLFSLGWVQPSRTLAGETGQEAAPLDGVLANPPNISSLSPRQLLGFPCAEVSGLSTERVRELAVALAQKNVKLSTEQLRCLAHRLSEPPEDLDALPLDLLLFLNPDAFSGPQACTRFFSRITKANVDLLPRGAPERQRLLPAALACWGVRGSLLSEADVRALGGLACDLPGRFVAESAEVLLPRLVSCPGPLDQDQQEAARAALQGGGPPYGPPSTWSVSTMDALRGLLPVLGQPIIRSIPQGIVAAWRQRSSRDPSWRQPERTILRPRFRREVEKTACPSGKKAREIDESLIFYKKWELEACVDAALLATQMDRVNAIPFTYEQLDVLKHKLDELYPQGYPESVIQHLGYLFLKMSPEDIRKWNVTSLETLKALLEVNKGHEMSPQAPRRPLPQVATLIDRFVKGRGQLDKDTLDTLTAFYPGYLCSLSPEELSSVPPSSIWAVRPQDLDTCDPRQLDVLYPKARLAFQNMNGSEYFVKIQSFLGGAPTEDLKALSQQNVSMDLATFMKLRTDAVLPLTVAEVQKLLGPHVEGLKAEERHRPVRDWILRQRQDDLDTLGLGLQGGIPNGYLVLDLSMQEALSGTPCLLGPGPVLTVLALLLASTLAXGPHSLAGPSPAGDPRLARSRHGWSPFHPKRTRAQ

SEQ ID NO: 488 - protein, 161 aa, Homo Sapiens
  misc_feature (115)..(115): Xaa can be any naturally occurring amino acid
MNVLLGSVVIFATFVTLCNASCYFIPNEGVPGDSTRKCMDLKGNKHPINSEWQTDNCETCTCYETEISCCTLVSTPVGYDKDNCQRIFKKEDCKYIVVEKKDPKKTCSVSEWIIXCASSRHRAPRPGLILLWPLIVNDCVAMPISKKIFEQTLEYVCPFNL

SEQ ID NO: 489 - protein, 98 aa, Homo Sapiens
  misc_feature (78)..(78): Xaa can be any naturally occurring amino acid
MNVLLGSVVIFATFVTLCNASCYFIPNEGVPGDSTRMFLHLWVMTKTTAKESSRRRTASISWWRRRTQKRPVLSVNGXSNVLLVGTGLPGQASFSSGL

SEQ ID NO: 490 - protein, 72 aa, Homo Sapiens
  misc_feature (62)..(62): Xaa can be any naturally occurring amino acid
MDPNCSCAAGVSCTCASSCKCKECKCTSCKKSCCSCCPVGCAKCAQGCICKGASEKCSCCAXCRDSPAPKYK

SEQ ID NO: 491 - protein, 232 aa, Homo Sapiens
  misc_feature (229)..(229): Xaa can be any naturally occurring amino acid
MERVKMINVQRLLEAAEFLERRERECEHGYASSFPSMPSPRLQHSKPPRRLSRAQKHSSGSSNTSTANRSTHNELEKNRRAHLRLCLERLKVLIPLGPDCTRHTTLGLLNKAKAHIKKLEEAERKSQHQLENLEREQRFLKWRLEQLQGPQEMERIRMDSIGSTISSDRSDSEREEIEVDVESTEFSHGEVDNISTTSISDIDDHSSLPSIGSDEGYSSASVKLSFTSXNPA

SEQ ID NO: 492 - protein, 767 aa, Homo Sapiens
  misc_feature (701)..(701): Xaa can be any naturally occurring amino acid
MSRRTRCEDLDELHYQDTDSDVPEQRDSKCKVKWTHEEDEQLRALVRQFGQQDWKFLASHFPNRTDQQCQYRWLRVLNPDLVKGPWTKEEDQKVIELVKKYGTKQWTLIAKHLKGRLGKQCRERWHNHLNPEVKKSCWTEEEDRIICEAHKVLGNRWAEIAKMLPGRTDNAVKNHWNSTIKRKVDTGGFLSESKDCKPPVYLLLELEDKDGLQSAQPTEGQGSLLTNWPSVPPTIKEEENSEEELAAATTSKEQEPIGTDLDAVRTPEPLEEFPKREDQEGSPPETSLPYKWVVEAANLLIPAVGSSLSEALDLIESDPDAWCDLSKFDLPEEPSAEDSINNSLVQLQASHQQQVLPPRQPSALVPSVTEYRLDGHTISDLSRSSRGELIPISPSTEVGGSGIGTPPSVLKRQRKRRVALSPVTENSTSLSFLDSCNSLTPKSTPVKTLPFSPSQFLNFWNKQDTLELESPSLTSTPVCSQKVVVTTPLHRDKTPLHQKHAAFVTPDQKYSMDNTPHTPTPFKNALEKYGPLKPLPQTPHLEEDLKEVLRSEAGIELIIEDDIRPEKQKRKPGLRRSPIKKVRKSLALDIVDEDVKLMMSTLPKSLSLPTTAPSNSSSLTLSGIKEDNSLLNQGFLQAKPEKAAVAQKPRSHFTTPAPMSSAWKTVACGGTRDQLFMQEKARQLLGRLKPSHTSRTLILSXGVEGVTSPFSCLQGLWGQRGSVNLRVIQVTSCREPSATSPSPDSQVEATGPCAALLPSPAVGGSWC

SEQ ID NO: 493 - protein, 473 aa, Homo Sapiens
  misc_feature (455)..(455): Xaa can be any naturally occurring amino acid
MDFFRVVENQQPPATMPLNVSFTNRNYDLDYDSVQPYFYCDEEENFYQQQQQSELQPPAPSEDIWKKFELLPTPPLSPSRRSGLCSPSYVAVTPFSLRGDNDGGGGSFSTADQLEMVTELLGGDMVNQSFICDPDDETFIKNIIIQDCMWSGFSAAAKLVSEKLASYQAARKDSGSPNPARGHSVCSTSSLYLQDLSAAASECIDPSVVFPYPLNDSSSPKSCASQDSSAFSPSSDSLLSSTESSPQGSPEPLVLHEETPPTTSSDSEEEQEDEEEIDVVSVEKRQAPGKRSESGSPSAGGHSKPPHSPLVLKRCHVSTHQHNYAAPPSTRKDYPAAKRVKLDSVRVLRQISNNRKCTSPRSSDTEENVKRRTHNVLERQRRNELKRSFFALRDQIPELENNEKAPKVVILKKATAYILSVQAEEQKLISEEDLLRKRREQLKHKLEQLRNSCAXGKVRKTIPSNRNVLSNHL

SEQ ID NO: 494 - protein, 305 aa, Homo Sapiens
  misc_feature (225)..(225): Xaa can be any naturally occurring amino acid
MELYETSPYFYQEPRFYDGENYLPVHLQGFEPPGYERTELTLSPEAPGPLEDKGLGTPEHCPGQCLPWACKVCKRKSVSVDRRRAATLREKRRLKKVNEAFEALKRSTLLNPNQRLPKVEILRSAIQYIERLQALLSSLNQEERDLRYRGGGGPQPGVPSECSSHSASCSPEWGSALEFSANPGDHLLTADPTDAHNLHSLTSIVDSITVEDVSVAFPDETMPNXDCLPSRASLRAPQAGHRCHYFCSRGLLSQAALMLGSQLWGAIGQTIPFLIHVRLTHPPARDWTPSFSCLLRGEGIPFPGR

SEQ ID NO: 495 - protein, 306 aa, Homo Sapiens
  misc_feature (291)..(291): Xaa can be any naturally occurring amino acid
MDIEAYFERIGYKNSRNKLDLETLTDILEHQIRAVPFENLNMHCGQAMELGLEAIFDHIVRRNRGGWCLQVNQLLYWALTTIGFQTTMLGGYFYIPPVNKYSTGMVHLLLQVTIDGRNYIVDAGSGSSSQMWQPLELISGKDQPQVPCIFCLTEERGIWYLDQIRREQYITNKEFLNSHLLPKKKHQKIYLFTLEPRTIEDFESMNTYLQTSPTSSFITTSFCSLQTPEGVYCLVGFILTYRKFNYKDNTDLVEFKTLTEEEVEEVLRNIFKISLGRNLVPKPGDGSLTIXNKEQNKPLCMYHPTH

SEQ ID NO: 496 - protein, 1428 aa, Homo Sapiens
  misc_feature (1421)..(1421): Xaa can be any naturally occurring amino acid
MSGLGENLDPLASDSRKRKLPCDTPGQGLTCSGEKRRREQESKYIEELAELISANLSDIDNFNVKPDKCAILKETVRQIRQIKEQGKTISNDDDVQKADVSSTGQGVIDKDSLGPLLLQALDGFLFVVNRDGNIVFVSENVTQYLQYKQEDLVNTSVYNILHEEDRKDFLKNLPKSTVNGVSWTNETQRQKSHTFNCRMLMKTPHDILEDINASPEMRQRYETMQCFALSQPRAMMEEGEDLQSCMICVARRITTGERTFPSNPESFITRHDLSGKVVNIDTNSLRSSMRPGFEDIIRRCIQRFFSLNDGQSWSQKRHYQEAYLNGHAETPVYRFSLADGTIVTAQTKSKLFRNPVTNDRHGFVSTHFLQREQNGYRPNPNPVGQGIRPPMAGCNSSVGGMSMSPNQGLQMPSSRAYGLADPSTTGQMSGARYGGSSNIASLTPGPGMQSPSSYQNNNYGLNMSSPPHGSPGLAPNQQNIMISPRNRGSPKIASHQFSPVAGVHSPMASSGNTGNHSFSSSSLSALQAISEGVGTSLLSTLSSPGPKLDNSPNMNITQPSKVSNQDSKSPLGFYCDQNPVESSMCQSNSRDHLSDKESKESSVEGAENQRGPLESKGHKKLLQLLTCSSDDRGHSSLTNSPLDSSCKESSVSVTSPSGVSSSTSGGVSSTSNMHGSLLQEKHRILHKLLQNGNSPAEVAKITAEATGKDTSSITSCGDGNVVKQEQLSPKKKENNALLRYLLDRDDPSDALSKELQPQVEGVDNKMSQCTSSTIPSSSQEKDPKIKTETSEEGSGDLDNLDAILGDLTSSDFYNNSISSNGSHLGTKQQVFQGTNSLGLKSSQSVQSIRPPYNRAVSLDSPVSVGSSPPVKNISAFPMLPKQPMLGGNPRMMDSQENYGSSMGGPNRNVTVTQTPSSGDWGLPNSKAGRMEPMNSNSMGRPGGDYNTSLPRPALGGSIPTLPLRSNSIPGARPVLQQQQQMLQMRPGEIPMGMGANPYGQAAASNQLGSWPDGMLSMEQVSHGTQNRPLLRNSLDDLVGPPSNLEGQSDERALLDQLHTLLSNTDATGLEEIDRALGIPELVNQGQALEPKQDAFQGQEAAVMMDQKAGLYGQTYPAQGPPMQGGFHLQGQSPSFNSMMNQMNQQGNFPLQGMHPRANIMRPRTNTPKQLRMQLQQRLQGQQFLNQSRQALELKMENPTAGGAAVMRPMMQPQQGFLNAQMVAQRSRELLSHHFRQQRVAMMMQQQQQQQQQQQQQQQQQQQQQQQQQQQQQTQAFSPPPNVTASPSMDGLLAGPTMPQAPPQQFPYQPNYGMGQQPDPAFGRVSSPPNAMMSSRMGPSQNPMMQHPQAASIYQSSEMKGWPSGNLARNSSFSQQQFAHQGNPAVYSMVHMNGSSGHMGQMNMNPMPMSGMPMGPDQKYCXHLCTRTS

SEQ ID NO: 497 - protein, 1432 aa, Homo Sapiens
  misc_feature (1425)..(1425): Xaa can be any naturally occurring amino acid
MSGLGENLDPLASDSRKRKLPCDTPGQGLTCSGEKRRREQESKYIEELAELISANLSDIDNFNVKPDKCAILKETVRQIRQIKEQGKTISNDDDVQKADVSSTGQGVIDKDSLGPLLLQALDGFLFVVNRDGNIVFVSENVTQYLQYKQEDLVNTSVYNILHEEDRKDFLKNLPKSTVNGVSWTNETQRQKSHTFNCRMLMKTPHDILEDINASPEMRQRYETMQCFALSQPRAMMEEGEDLQSCMICVARRITTGERTFPSNPESFITRHDLSGKVVNIDTNSLRSSMRPGFEDIIRRCIQRFFSLNDGQSWSQKRHYQEAYLNGHAETPVYRFSLADGTIVTAQTKSKLFRNPVTNDRHGFVSTHFLQREQNGYRPNPNPVGQGIRPPMAGCNSSVGGMSMSPNQGLQMPSSRAYGLADPSTTGQMSGARYGGSSNIASLTPGPGMQSPSSYQNNNYGLNMSSPPHGSPGLAPNQQNIMISPRNRGSPKIASHQFSPVAGVHSPMASSGNTGNHSFSSSSLSALQAISEGVGTSLLSTLSSPGPKLDNSPNMNITQPSKVSNQDSKSPLGFYCDQNPVESSMCQSNSRDHLSDKESKESSVEGAENQRGPLESKGHKKLLQLLTCSSDDRGHSSLTNSPLDSSCKESSVSVTSPSGVSSSTSGGVSSTSNMHGSLLQEKHRILHKLLQNGNSPAEVAKITAEATGKDTSSITSCGDGNVVKQEQLSPKKKENNALLRYLLDRDDPSDALSKELQPQVEGVDNKMSQCTSSTIPSSSQEKDPKIKTETSEEGSGDLDNLDAILGDLTSSDFYNNSISSNGSHLGTKQQVFQGTNSLGLKSSQSVQSIRPPYNRAVSLDSPVSVGSSPPVKNISAFPMLPKQPMLGGNPRMMDSQENYGSSMGGPNRNVTVTQTPSSGDWGLPNSKAGRMEPMNSNSMGRPGGDYNTSLPRPALGGSIPTLPLRSNSIPGARPVLQQQQQMLQMRPGEIPMGMGANPYGQAAASNQLGSWPDGMLSMEQVSHGTQNRPLLRNSLDDLVGPPSNLEGQSDERALLDQLHTLLSNTDATGLEEIDRALGIPELVNQGQALEPKQDAFQGQEAAVMMDQKAGLYGQTYPAQGPPMQGGFHLQGQSPSFNSMMNQMNQQGNFPLQGMHPRANIMRPRTNTPKQLRMQLQQRLQGQQFLNQSRQALELKMENPTAGGAAVMRPMMQPQVSSQQGFLNAQMVAQRSRELLSHHFRQQRVAMMMQQQQQQQQQQQQQQQQQQQQQQQQQQQQQTQAFSPPPNVTASPSMDGLLAGPTMPQAPPQQFPYQPNYGMGQQPDPAFGRVSSPPNAMMSSRMGPSQNPMMQHPQAASIYQSSEMKGWPSGNLARNSSFSQQQFAHQGNPAVYSMVHMNGSSGHMGQMNMNPMPMSGMPMGPDQKYCXHLCTRTS

SEQ ID NO: 498 - protein, 405 aa, Homo Sapiens
  misc_feature (395)..(395): Xaa can be any naturally occurring amino acid
MSREMQDVDLAEVKPLVEKGETITGLLQEFDVQEQDIETLHGSVHVTLCGTPKGNRPVILTYHDIGMNHKTCYNPLFNYEDMQEITQHFAVCHVDAPGQQDGAASFPAGYMYPSMDQLAEMLPGVLQQFGLKSIIGMGTGAGAYILTRFALNNPEMVEGLVLINVNPCAEGWMDWAASKISGWTQALPDMVVSHLFGKEEMQSNVEVVHTYRQHIVNDMNPGNLHLFINAYNSRRDLEIERPMPGTHTVTLQCPALLVVGDSSPAVDAVVECNSKLDPTKTTLLKMADCGGLPQISQPAKLAEAFKYFVQGMGYMPSASMTRLMRSRTASGSSVTSLDGTRSRSHTSEGTRSRSHTSEGTRSRSHTSEGAHLDITPNSGAAGNSAGPKSMEVSCXAACPAAAPGL

SEQ ID NO: 499 - protein, 94 aa, Homo Sapiens
  misc_feature (82)..(82): Xaa can be any naturally occurring amino acid
MLIKVKTLTGKEIEIDIEPTDKVERIKERVEEKEGIPPQQQRLIYSGKQMNDEKTAADYKILGGSVLHLVLALRGGGGLRQXWTLHFTSLPCRS

SEQ ID NO: 500 - protein, 1481 aa, Homo Sapiens
  misc_feature (1462)..(1462): Xaa can be any naturally occurring amino acid
MAAERGARRLLSTPSFWLYCLLLLGRRAPGAAAARSGSAPQSPGASIRTFTPFYFLVEPVDTLSVRGSSVILNCSAYSEPSPKIEWKKDGTFLNLVSDDRRQLLPDGSLFISNVVHSKHNKPDEGYYQCVATVESLGTIISRTAKLIVAGLPRFTSQPEPSSVYAGNNAILNCEVNADLVPFVRWEQNRQPLLLDDRVIKLPSGMLVISNATEGDGGLYRCVVESGGPPKYSDEVELKVLPDPEVISDLVFLKQPSPLVRVIGQDVVLPCVASGLPTPTIKWMKNEEALDTESSERLVLLAGGSLEISDVTEDDAGTYFCIADNGNETIEAQAELTVQAQPEFLKQPTNIYAHESMDIVFECEVTGKPTPTVKWVKNGDMVIPSDYFKIVKEHNLQVLGLVKSDEGFYQCIAENDVGNAQAGAQLIILEHAPATTGPLPSAPRDVVASLVSTRFIKLTWRTPASDPHGDNLTYSVFYTKEGIARERVENTSHPGEMQVTIQNLMPATVYIFRVMAQNKHGSGESSAPLRVETQPEVQLPGPAPNLRAYAASPTSITVTWETPVSGNGEIQNYKLYYMEKGTDKEQDVDVSSHSYTINGLKKYTEYSFRVVAYNKHGPGVSTPDVAVRTLSDVPSAAPQNLSLEVRNSKSIMIHWQPPAPATQNGQITGYKIRYRKASRKSDVTETLVSGTQLSQLIEGLDRGTEYNFRVAALTINGTGPATDWLSAETFESDLDETRVPEVPSSLHVRPLVTSIVVSWTPPENQNIVVRGYAIGYGIGSPHAQTIKVDYKQRYYTIENLDPSSHYVITLKAFNNVGEGIPLYESAVTRPHTDTSEVDLFVINAPYTPVPDPTPMMPPVGVQASILSHDTIRITWADNSLPKHQKITDSRYYTVRWKTNIPANTKYKNANATTLSYLVTGLKPNTLYEFSVMVTKGRRSSTWSMTAHGTTFELVPTSPPKDVTVVSKEGKPKTIIVNWQPPSEANGKITGYIIYYSTDVNAEIHDWVIEPVVGNRLTHQIQELTLDTPYYFKIQARNSKGMGPMSEAVQFRTPKADSSDKMPNDQASGSGGKGSRLPDLGSDYKPPMSGSNSPHGSPTSPLDSNMLLVIIVSVGVITIVVVVIIAVFCTRRTTSHQKKKRAACKSVNGSHKYKGNSKDVKPPDLWIHHERLELKPIDKSPDPNPIMTDTPIPRNSQDITPVDNSMDSNIHQRRNSYRGHESEDSMSTLAGRRGMRPKMMMPFDSQPPQPVISAHPIHSLDNPHHHFHSSSLASPARSHLYHPGSPWPIGTSMSLSDRANSTESVRNTPSTDTMPASSSQTCCTDHQDPEGATSSSYLASSQEEDSGQSLPTAHVRPSHPLKSFAVPAIPPPGPPTYDPALPSTPLLSQQALNHHIHSVKTASIGTLGRSRPPMPVVVPSAPEVQETTRMLEDSESSYEPDELTKEMAHLEGLMKDLNAITTAXRPSPGPDFKPESGSLGTYP

SEQ ID NO: 501 - protein, 994 aa, Homo Sapiens
  misc_feature (970)..(970): Xaa can be any naturally occurring amino acid
MAEDDPYLGRPEQMFHLDPSLTHTIFNPEVFQPQMALPTADGPYLQILEQPKQRGFRFRYVCEGPSHGGLPGASSEKNKKSYPQVKICNYVGPAKVIVQLVTNGKNIHLHAHSLVGKHCEDGICTVTAGPKDMVVGFANLGILHVTKKKVFETLEARMTEACIRGYNPGLLVHPDLAYLQAEGGGDRQLGDREKELIRQAALQQTKEMDLSVVRLMFTAFLPDSTGSFTRRLEPVVSDAIYDSKAPNASNLKIVRMDRTAGCVTGGEEIYLLCDKVQKDDIQIRFYEEEENGGVWEGFGDFSPTDVHRQFAIVFKTPKYKDINITKPASVFVQLRRKSDLETSEPKPFLYYPEIKDKEEVQRKRQKLMPNFSDSFGGGSGAGAGGGGMFGSGGGGGGTGSTGPGYSFPHYGFPTYGGITFHPGTTKSNAGMKHGTMDTESKKDPEGCDKSDDKNTVNLFGKVIETTEQDQEPSEATVGNGEVTLTYATGTKEESAGVQDNLFLEKAMQLAKRHANALFDYAVTGDVKMLLAVQRHLTAVQDENGDSVLHLAIIHLHSQLVRDLLEVTSGLISDDIINMRNDLYQTPLHLAVITKQEDVVEDLLRAGADLSLLDRLGNSVLHLAAKEGHDKVLSILLKHKKAALLLDHPNGDGLNAIHLAMMSNSLPCLLLLVAAGADVNAQEQKSGRTALHLAVEHDNISLAGCLLLEGDAHVDSTTYDGTTPLHIAAGRGSTRLAALLKAAGADPLVENFEPLYDLDDSWENAGEDEGVVPGTTPLDMATSWQVFDILNGKPYEPEFTSDDLLAQGDMKQLAEDVKLQLYKLLEIPDPDKNWATLAQKLGLGILNNAFRLSPAPSKTLMDNYEVSGGTVRELVEALRQMGYTEAIEVIQAASSPVKTTSQAHSLPLSPASTRQQIDELRDSDSVCDSGVETSFRKLSFTESLTSGASLLTLNKMPHDYGQEGPLEGKIXPADNFPHRVNQSPKIPLRCPQDRS

SEQ ID NO: 502 - protein, 924 aa, Homo Sapiens
  misc_feature (901)..(901): Xaa can be any naturally occurring amino acid
MESCYNPGLDGIIEYDDFKLNSSIVEPKEPAPETADGPYLVIVEQPKQRGFRFRYGCEGPSHGGLPGASSEKGRKTYPTVKICNYEGPAKIEVDLVTHSDPPRAHAHSLVGKQCSELGICAVSVGPKDMTAQFNNLGVLHVTKKNMMGTMIQKLQRQRLRSRPQGLTEAEQRELEQEAKELKKVMDLSIVRLRFSAFLRASDGSFSLPLKPVISQPIHDSKSPGASNLKISRMDKTAGSVRGGDEVYLLCDKVQKDDIEVRFYEDDENGWQAFGDFSPTDVHKQYAIVFRTPPYHKMKIERPVTVFLQLKRKRGGDVSDSKQFTYYPLVEDKEEVQRKRRKALPTFSQPFGGGSHMGGGSGGAAGGYGGAGGGGSLGFFPSSLAYSPYQSGAGPMGCYPGGGGGAQMAATVPSRDSGEEAAEPSAPSRTPQCEPQAPEMLQRAREYNARLFGLAQRSARALLDYGVTADARALLAGQRHLLTAQDENGDTPLHLAIIHGQTSVIEQIVYVIHHAQDLGVVNLTNHLHQTPLHLAVITGQTSVVSFLLRVGADPALLDRHGDSAMHLALRAGAGAPELLRALLQSGAPAVPQLLHMPDFEGLYPVHLAVRARSPECLDLLVDSGAEVEATERQGGRTALHLATEMEELGLVTHLVTKLRANVNARTFAGNTPLHLAAGLGYPTLTRLLLKAGADIHAENEEPLCPLPSPPTSDSDSDSEGPEKDTRSSFRGHTPLDLTCSTKVKTLLLNAAQNTMEPPLTPPSPAGPGLSLGDTALQNLEQLLDGPEAQGSWAELAERLGLRSLVDTYRQTTSPSGSLLRSYELAGGDLAGLLEALSDMGLEEGVRLLRGPETRDKLPSTAEVKEDSAYGSQSVEQEAEKLGPPPEPPGGLCHGHPQPQVHXPAACPQPPSRTPCTASPPISNLI

SEQ ID NO: 503 - protein, 923 aa, Homo Sapiens
  misc_feature (900)..(900): Xaa can be any naturally occurring amino acid
MESCYNPGLDGIIEYDDFKLNSSIVEPKEPAPETADGPYLVIVEQPKQRGFRFRYGCEGPSHGGLPGASSEKGRKTYPTVKICNYEGPAKIEVDLVTHSDPPRAHAHSLVGKQCSELGICAVSVGPKDMTAQFNNLGVLHVTKKNMMGTMIQKLQRQRLRSRPQGLTEAEQRELEQEAKELKKVMDLSIVRLRFSAFLRASDGSFSLPLKPVISQPIHDSKSPGASNLKISRMDKTAGSVRGGDEVYLLCDKVQKDDIEVRFYEDDENGWQAFGDFSPTDVHKQYAIVFRTPPYHKMKIERPVTVFLQLKRKRGGDVSDSKQFTYYPLVEDKEEVQRKRRKALPTFSQPFGGGSHMGGGSGGAAGGYGGAGGGGSLGFFPSSLAYSPYQSGAGPMGCYPGGGGGAQMAATVPSRDSGEEAAEPSAPSRTPQCEPQAPEMLQRAREYNARLFGLAQRSARALLDYGVTADARALLAGQRHLLTAQDENGDTPLHLAIIHGQTSVIEQIVYVIHHAQDLGVVNLTNHLHQTPLHLAVITGQTSVVSFLLRVGADPALLDRHGDSAMHLALRAGAGAPELLRALLQSGAPAVPQLLHMPDFEGLYPVHLAVRARSPECLDLLVDSGAEVEATERQGGRTALHLATEMEELGLVTHLVTKLRANVNARTFAGNTPLHLAAGLGYPTLTRLLLKAGADIHAENEEPLCPLPSPPTSDSDSDSEGPEKDTRSSFRGHTPLDLTCSTKVKTLLLNAAQNTMEPPLTPPSPAGPGLSLGDTALQNLEQLLDGPEAQGSWAELAERLGLRSLVDTYRQTTSPSGSLLRSYELAGGDLAGLLEALSDMGLEEGVRLLRGPETRDKLPSTEVKEDSAYGSQSVEQEAEKLGPPPEPPGGLCHGHPQPQVHXPAACPQPPSRTPCTASPPISNLI

SEQ ID NO: 504 - protein, 322 aa, Homo Sapiens
  misc_feature (318)..(318): Xaa can be any naturally occurring amino acid
MFQAAERPQEWAMEGPRDGLKKERLLDDRHDSGLDSMKDEEYEQMVKELQEIRLEPQEVPRGSEPWKQQLTEDGDSFLHLAIIHEEKALTMEVIRQVKGDLAFLNFQNNLQQTPLHLAVITNQPEIAEALLGAGCDPELRDFRGNTPLHLACEQGCLASVGVLTQSCTTPHLHSILKATNYNGHTCLHLASIHGYLGIVELLVSLGADVNAQEPCNGRTALHLAVDLQNPDLVSLLLKCGADVNRVTYQGYSPYQLTWGRPSTRIQQQLGQLTLENLQMLPESEDEESYDTESEFTEFTEDELPYDDCVFGGQRLTLXVQRG

SEQ ID NO: 505 - protein, 264 aa, Homo Sapiens
  misc_feature (242)..(242): Xaa can be any naturally occurring amino acid
MSMLFYTLITAFLIGIQAEPHSESNVPAGHTIPQAHWTKLQHSLDTALRRARSAPAAAIAARVAGQTRNITVDPRLFKKRRLRSPRVLFSTQPPREAADTQDLDFEVGGAAPFNRTHRSKRSSSHPIFHRGEFSVCDSVSVWVGDKTTATDIKGKEVMVLGEVNINNSVFKQYFFETKCRDPNPVDSGCRGIDSKHWNSYCTTTHTFVKALTMDGKQAAWRFIRIDTACVCVLSRKAVRRAXPADTLPPPAPSTLSWAPPYLNL

SEQ ID NO: 506 - protein, 597 aa, Homo Sapiens
  misc_feature (428)..(428): Xaa can be any naturally occurring amino acid
MGAGATGRAMDGPRLLLLLLLGVSLGGAKEACPTGLYTHSGECCKACNLGEGVAQPCGANQTVCEPCLDSVTFSDVVSATEPCKPCTECVGLQSMSAPCVEADDAVCRCAYGYYQDETTGRCEACRVCEAGSGLVFSCQDKQNTVCEECPDGTYSDEANHVDPCLPCTVCEDTERQLRECTRWADAECEEIPGRWITRSTPPEGSDSTAPSTQEPEAPPEQDLIASTVAGVVTTVMGSSQPVVTRGTTDNLIPVYCSILAAVVVGLVAYIAFKRWNSCKQNKQGANSRPVNQTPPPEGEKLHSDSGISVDSQSLHDQQPHTQTASGQALKGDGGLYSSLPPAKREEVEKLLNGSAGDTWRHLAGELGYQPEHIDSFTHEACPVRALLASWATQDSATLDALLAALRRIQRADLVESLCSESTATSPVXAQPGSPRPAPHSDNRCSSQPLWSPHPHPLGGARLAELSSSGQDLRVQAPKPQPCQCSPCGPFTSDHTSCPEREVPLLPPQPCPCPVTISGHLPPSPTLLGGPAPPTTAGVIYGGPTPGMVLGGSDKAPETQREESRNQSHGLYTVNLGNKGGIPVASTLPQPLLPPTPA

SEQ ID NO: 507 - protein, 239 aa, Homo Sapiens
  misc_feature (235)..(235): Xaa can be any naturally occurring amino acid
MLRVPEPRPGEAKAEGAAPPTPSKPLTSFLIQDILRDGAQRQGGRTSSQRQRDPEPEPEPEPEGGRSRAGAQNDQLSTGPRAAPEEAETLAETEPERHLGSYLLDSENTSGALPRLPQTPKQPQKRSRAAFSHTQVIELERKFSHQKYLSAPERAHLAKNLKLTETQVKIWFQNRRYKTKRKQLSSELGDLEKHSSLPALKEEAFSRASLVSVYNSYPYYPYLYCVGSWSPAFWXCQLR

SEQ ID NO: 508 - protein, 176 aa, Homo Sapiens
  misc_feature (153)..(153): Xaa can be any naturally occurring amino acid
MANLERTFIAIKPDGVQRGLVGEIIKRFEQKGFRLVAMKFLRASEEHLKQHYIDLKDRPFFPGLVKYMNSGPVVAMVWEGLNVVKTGRVMLGETNPADSKPGTIRGDFCIQVGRNIIHGSDSVKSAEKEISLWFKPEELVDYKSCAHDWVYEXEVDTTAVSFSTAWCVPGHSSSFH

SEQ ID NO: 509 - protein, 1453 aa, Homo Sapiens
  misc_feature (1435)..(1435): Xaa can be any naturally occurring amino acid
MEDHMFGVQQIQPNVISVRLFKRKVGGLGFLVKERVSKPPVIISDLIRGGAAEQSGLIQAGDIILAVNGRPLVDLSYDSALEVLRGIASETHVVLILRGPEGFTTHLETTFTGDGTPKTIRVTQPLGPPTKAVDLSHQPPAGKEQPLAVDGASGPGNGPQHAYDDGQEAGSLPHANGLAPRPPGQDPAKKATRVSLQGRGENNELLKEIEPVLSLLTSGSRGVKGGAPAKAEMKDMGIQVDRDLDGKSHKPLPLGVENDRVFNDLWGKGNVPVVLNNPYSEKEQPPTSGKQSPTKNGSPSKCPRFLKVKNWETEVVLTDTLHLKSTLETGCTEYICMGSIMHPSQHARRPEDVRTKGQLFPLAKEFIDQYYSSIKRFGSKAHMERLEEVNKEIDTTSTYQLKDTELIYGAKHAWRNASRCVGRIQWSKLQVFDARDCTTAHGMFNYICNHVKYATNKGNLRSAITIFPQRTDGKHDFRVWNSQLIRYAGYKQPDGSTLGDPANVQFTEICIQQGWKPPRGRFDVLPLLLQANGNDPELFQIPPELVLEVPIRHPKFEWFKDLGLKWYGLPAVSNMLLEIGGLEFSACPFSGWYMGTEIGVRDYCDNSRYNILEEVAKKMNLDMRKTSSLWKDQALVEINIAVLYSFQSDKVTIVDHHSATESFIKHMENEYRCRGGCPADWVWIVPPMSGSITPVFHQEMLNYRLTPSFEYQPDPWNTHVWKGTNGTPTKRRAIGFKKLAEAVKFSAKLMGQAMAKRVKATILYATETGKSQAYAKTLCEIFKHAFDAKVMSMEEYDIVHLEHETLVLVVTSTFGNGDPPENGEKFGCALMEMRHPNSVQEERKSYKVRFNSVSSYSDSQKSSGDGPDLRDNFESAGPLANVRFSVFGLGSRAYPHFCAFGHAVDTLLEELGGERILKMREGDELCGQEEAFRTWAKKVFKAACDVFCVGDDVNIEKANNSLISNDRSWKRNKFRLTFVAEAPELTQGLSNVHKKRVSAARLLSRQNLQSPKSSRSTIFVRLHTNGSQELQYQPGDHLGVFPGNHEDLVNALIERLEDAPPVNQMVKVELLEERNTALGVISNWTDELRLPPCTIFQAFKYYLDITTPPTPLQLQQFASLATSEKEKQRLLVLSKGLQEYEEWKWGKNPTIVEVLEEFPSIQMPATLLLTQLSLLQPRYYSISSSPDMYPDEVHLTVAIVSYRTRDGEGPIHHGVCSSWLNRIQADELVPCFVRGAPSFHLPRNPQVPCILVGPGTGIAPFRSFWQQRQFDIQHKGMNPCPMVLVFGCRQSKIDHIYREETLQAKNKGVFRELYTAYSREPDKPKKYVQDILQEQLAESVYRALKEQGGHIYVCGDVTMAADVLKAIQRIMTQQGKLSAEDAGVFISRMRDDNRYHEDIFGVTLRTYEVTNRLRSESIAFIEESKKDTDEVFSSXLDPLAQPAASFVSADRHC

SEQ ID NO: 510 - protein, 1216 aa, Homo Sapiens
  misc_feature (1154)..(1154): Xaa can be any naturally occurring amino acid
MACPWKFLFKTKFHQYAMNGEKDINNNVEKAPCATSSPVTQDDLQYHNLSKQQNESPQPLVETGKKSPESLVKLDATPLSSPRHVRIKNWGSGMTFQDTLHHKAKGILTCRSKSCLGSIMTPKSLTRGPRDKPTPPDELLPQAIEFVNQYYGSFKEAKIEEHLARVEAVTKEIETTGTYQLTGDELIFATKQAWRNAPRCIGRIQWSNLQVFDARSCSTAREMFEHICRHVRYSTNNGNIRSAITVFPQRSDGKHDFRVWNAQLIRYAGYQMPDGSIRGDPANVEFTQLCIDLGWKPKYGRFDVVPLVLQANGRDPELFEIPPDLVLEVAMEHPKYEWFRELELKWYALPAVANMLLEVGGLEFPGCPFNGWYMGTEIGVRDFCDVQRYNILEEVGRRMGLETHKLASLWKDQAVVEINIAVLHSFQKQNVTIMDHHSAAESFMKYMQNEYRSRGGCPADWIWLVPPMSGSITPVFHQEMLNYVLSPFYYYQVEAWKTHVWQDEKRRPKRREIPLKVLVKAVLFACMLMRKTMASRVRVTILFATETGKSEALAWDLGALFSCAFNPKVVCMDKYRLSCLEEERLLLVVTSTFGNGDCPGNGEKLKKSLFMLKELNNKFRYAVFGLGSSMYPRFCAFAHDIDQKLSHLGASQLTPMGEGDELSGQEDAFRSWAVQTFKAACETFDVRGKQHIQIPKLYTSNVTWDPHHYRLVQDSQPLDLSKALSSMHAKNVFTMRLKSRQNLQSPTSSRATILVELSCEDGQGLNYLPGEHLGVCPGNQPALVQGILERVVDGPTPHQTVRLEALDESGSYWVSDKRLPPCSLSQALTYFLDITTPPTQLLLQKLAQVATEEPERQRLEALCQPSEYSKWKFTNSPTFLEVLEEFPSLRVSAGFLLSQLPILKPRFYSISSSRDHTPTEIHLTVAVVTYHTRDGQGPLHHGVCSTWLNSLKPQDPVPCFVRNASGFHLPEDPSHPCILIGPGTGIAPFRSFWQQRLHDSQHKGVRGGRMTLVFGCRRPDEDHIYQEEMLEMAQKGVLHAVHTAYSRLPGKPKVYVQDILRQQLASEVLRVLHKEPGHLYVCGDVRMARDVAHTLKQLVAAKLKLNEEQVEDYFFQLKSQKRYHEDIFGAVFPYEAKKDRVAVQPSSLEMSALXGPTGGVKAAGTELKDGASSALSEVTGPGEMEESDIPQPQVLFPQRCSPSSPLLDLLTSSTLD

SEQ ID NO: 511 - protein, 2478 aa, Homo Sapiens
  misc_feature (2472)..(2472): Xaa can be any naturally occurring amino acid
MPALRPALLWALLALWLCCAAPAHALQCRDGYEPCVNEGMCVTYHNGTGYCKCPEGFLGEYCQHRDPCEKNRCQNGGTCVAQAMLGKATCRCASGFTGEDCQYSTSHPCFVSRPCLNGGTCHMLSRDTYECTCQVGFTGKECQWTDACLSHPCANGSTCTTVANQFSCKCLTGFTGQKCETDVNECDIPGHCQHGGTCLNLPGSYQCQCPQGFTGQYCDSLYVPCAPSPCVNGGTCRQTGDFTFECNCLPGFEGSTCERNIDDCPNHRCQNGGVCVDGVNTYNCRCPPQWTGQFCTEDVDECLLQPNACQNGGTCANRNGGYGCVCVNGWSGDDCSENIDDCAFASCTPGSTCIDRVASFSCMCPEGKAGLLCHLDDACISNPCHKGALCDTNPLNGQYICTCPQGYKGADCTEDVDECAMANSNPCEHAGKCVNTDGAFHCECLKGYAGPRCEMDINECHSDPCQNDATCLDKIGGFTCLCMPGFKGVHCELEINECQSNPCVNNGQCVDKVNRFQCLCPPGFTGPVCQIDIDDCSSTPCLNGAKCIDHPNGYECQCATGFTGVLCEENIDNCDPDPCHHGQCQDGIDSYTCICNPGYMGAICSDQIDECYSSPCLNDGRCIDLVNGYQCNCQPGTSGVNCEINFDDCASNPCIHGICMDGINRYSCVCSPGFTGQRCNIDIDECASNPCRKGATCINGVNGFRCICPEGPHHPSCYSQVNECLSNPCIHGNCTGGLSGYKCLCDAGWVGINCEVDKNECLSNPCQNGGTCDNLVNGYRCTCKKGFKGYNCQVNIDECASNPCLNQGTCFDDISGYTCHCVLPYTGKNCQTVLAPCSPNPCENAAVCKESPNFESYTCLCAPGWQGQRCTIDIDECISKPCMNHGLCHNTQGSYMCECPPGFSGMDCEEDIDDCLANPCQNGGSCMDGVNTFSCLCLPGFTGDKCQTDMNECLSEPCKNGGTCSDYVNSYTCKCQAGFDGVHCENNINECTESSCFNGGTCVDGINSFSCLCPVGFTGSFCLHEINECSSHPCLNEGTCVDGLGTYRCSCPLGYTGKNCQTLVNLCSRSPCKNKGTCVQKKAESQCLCPSGWAGAYCDVPNVSCDIAASRRGVLVEHLCQHSGVCINAGNTHYCQCPLGYTGSYCEEQLDECASNPCQHGATCSDFIGGYRCECVPGYQGVNCEYEVDECQNQPCQNGGTCIDLVNHFKCSCPPGTRGLLCEENIDDCARGPHCLNGGQCMDRIGGYSCRCLPGFAGERCEGDINECLSNPCSSEGSLDCIQLTNDYLCVCRSAFTGRHCETFVDVCPQMPCLNGGTCAVASNMPDGFICRCPPGFSGARCQSSCGQVKCRKGEQCVHTASGPRCFCPSPRDCESGCASSPCQHGGSCHPQRQPPYYSCQCAPPFSGSRCELYTAPPSTPPATCLSQYCADKARDGVCDEACNSHACQWDGGDCSLTMENPWANCSSPLPCWDYINNQCDELCNTVECLFDNFECQGNSKTCKYDKYCADHFKDNHCDQGCNSEECGWDGLDCAADQPENLAEGTLVIVVLMPPEQLLQDARSFLRALGTLLHTNLRIKRDSQGELMVYPYYGEKSAAMKKQRMTRRSLPGEQEQEVAGSKVFLEIDNRQCVQDSDHCFKNTDAAAALLASHAIQGTLSYPLVSVVSESLTPERTQLLYLLAVAVVIILFIILLGVIMAKRKRKHGSLWLPEGFTLRRDASNHKRREPVGQDAVGLKNLSVQVSEANLIGTGTSEHWVDDEGPQPKKVKAEDEALLSEEDDPIDRRPWTQQHLEAADIRRTPSLALTPPQAEQEVDVLDVNVRGPDGCTPLMLASLRGGSSDLSDEDEDAEDSSANIITDLVYQGASLQAQTDRTGEMALHLAARYSRADAAKRLLDAGADANAQDNMGRCPLHAAVAADAQGVFQILIRNRVTDLDARMNDGTTPLILAARLAVEGMVAELINCQADVNAVDDHGKSALHWAAAVNNVEATLLLLKNGANRDMQDNKEETPLFLAAREGSYEAAKILLDHFANRDITDHMDRLPRDVARDRMHHDIVRLLDEYNVTPSPPGTVLTSALSPVICGPNRSFLSLKHTPMGKKSRRPSAKSTMPTSLPNLAKEAKDAKGSRRKKSLSEKVQLSESSVTLSPVDSLESPHTYVSDTTSSPMITSPGILQASPNPMLATAAPPAPVHAQHALSFSNLHEMQPLAHGASTVLPSVSQLLSHHHIVSPGSGSAGSLSRLHPVPVPADWMNRMEVNETQYNEMFGMVLAPAEGTHPGIAPQSRPPEGKHITTPREPLPPIVTFQLIPKGSIAQPAGAPQPQSTCPPAVAGPLPTMYQIPEMARLPSVAFPTAMMPQQDGQVAQTILPAYHPFPASVGKYPTPPSQHSYASSNAAERTPSHSGHLQGEHPYLTPSPESPDQWSSSSPHSASDWSDVTTSPTPGGAGGGQRGPGTHMSEPPHNNMQVYAXESPPPV

SEQ ID NO: 512 - protein, 283 aa, Homo Sapiens
  misc_feature (275)..(275): Xaa can be any naturally occurring amino acid
MVGRRALIVLAHSERTSFNYAMKEAAAAALKKKGWEVVESDLYAMNFNPIISRKDITGKLKDPANFQYPAESVLAYKEGHLSPDIVAEQKKLEAADLVIFQFPLQWFGVPAILKGWFERVFIGEFAYTYAAMYDKGPFRSKKAVLSITTGGSGSMYSLQGIHGDMNVILWPIQSGILHFCGFQVLEPQLTYSIGHTPADARIQILEGWKKRLENIWDETPLYFAPSSLFDLNFQAGFLMKKEVQDEEKNKKFGLSVGHHLGKSIPTDNQIKARKXDSLAWISF

SEQ ID NO: 513 - protein, 488 aa, Homo Sapiens
  misc_feature (471)..(471): Xaa can be any naturally occurring amino acid
MAGENHQWQGSILYNMLMSAKQTRAAPEAPETRLVDQCWGCSCGDEPGVGREGLLGGRNVALLYRCCFCGKDHPRQGSILYSMLTSAKQTYAAPKAPEATLGPCWGCSCGSDPGVGRAGLPGGRPVALLYRCCFCGEDHPRQGSILYSLLTSSKQTHVAPAAPEARPGGAWWDRSYFAQRPGGKEALPGGRATALLYRCCFCGEDHPQQGSTLYCVPTSTNQAQAAPEERPRAPWWDTSSGALRPVALKSPQVVCEAASAGLLKTLRFVKYLPCFQVLPLDQQLVLVRNCWASLLMLELAQDRLQFETVEVSEPSMLQKILTTRRRETGGNEPLPVPTLQHHLAPPAEARKVPSASQVQAIKCFLSKCWSLNISTKEYAYLKGTVLFNPDVPGLQCVKYIQGLQWGTQQILSEHTRMTHQGPHDRFIELNSTLFLLRFINANVIAELFFRPIIGTVSMDDMMLEMLCTKIXSHVGHTSAVVQFTMREE

SEQ ID NO: 514 - protein, 538 aa, Homo Sapiens
  misc_feature (463)..(463): Xaa can be any naturally occurring amino acid
MSERKEGRGKGKGKKKERGSGKKPESAAGSQSPALPPRLKEMKSQESAAGSKLVLRCETSSEYSSLRFKWFKNGNELNRKNKPQNIKIQKKPGKSELRINKASLADSGEYMCKVISKLGNDSASANITIVESNEIITGMPASTEGAYVSSESPIRISVSTEGANTSSSTSTSTTGTSHLVKCAEKEKTFCVNGGECFMVKDLSNPSRYLCKCQPGFTGARCTENVPMKVQNQEKAEELYQKRVLTITGICIALLVVGIMCVVAYCKTKKQRKKLHDRLRQSLRSERNNMMNIANGPHHPNPPPENVQLVNQYVSKNVISSEHIVEREAETSFSTSHYTSTAHHSTTVTQTPSHSWSNGHTESILSESHSVIVMSSVENSRHSSPTGGPRGRLNGTGGPRECNSFLRHARETPDSYRDSPHSERHNLIAELRRNKAHRSKCMQIQLSATHLRSSSIPHLGFILXDPLAFRKVCVSHDHPGSYVTCRFPHAKLPQIAPFGNVSTRVQHDGVHAFHGGQPLHGRRETSTSRDTTKAAGEEV

SEQ ID NO: 515 - protein, 297 aa, Homo Sapiens
  misc_feature (242)..(242): Xaa can be any naturally occurring amino acid
MSERKEGRGKGKGKKKERGSGKKPESAAGSQSPALPPRLKEMKSQESAAGSKLVLRCETSSEYSSLRFKWFKNGNELNRKNKPQNIKIQKKPGKSELRINKASLADSGEYMCKVISKLGNDSASANITIVESNEIITGMPASTEGAYVSSESPIRISVSTEGANTSSSTSTSTTGTSHLVKCAEKEKTFCVNGGECFMVKDLSNPSRYLCKCPNEFTGDRCQNYVMASFYSTSTPFLSLPEXEHAQLVLLSCCCISPQIPPRARCVLPDLILTASACRMRTLTKAIVLLPLFATSWL

SEQ ID NO: 516 - protein, 656 aa, Homo Sapiens
  misc_feature (641)..(641): Xaa can be any naturally occurring amino acid
MSERKEGRGKGKGKKKERGSGKKPESAAGSQSPALPPRLKEMKSQESAAGSKLVLRCETSSEYSSLRFKWFKNGNELNRKNKPQNIKIQKKPGKSELRINKASLADSGEYMCKVISKLGNDSASANITIVESNEIITGMPASTEGAYVSSESPIRISVSTEGANTSSSTSTSTTGTSHLVKCAEKEKTFCVNGGECFMVKDLSNPSRYLCKCQPGFTGARCTENVPMKVQNQEKAEELYQKRVLTITGICIALLVVGIMCVVAYCKTKKQRKKLHDRLRQSLRSERNNMMNIANGPHHPNPPPENVQLVNQYVSKNVISSEHIVEREAETSFSTSHYTSTAHHSTTVTQTPSHSWSNGHTESILSESHSVIVMSSVENSRHSSPTGGPRGRLNGTGGPRECNSFLRHARETPDSYRDSPHSERYVSAMTTPARMSPVDFHTPSSPKSPPSEMSPPVSSMTVSMPSMAVSPFMEEERPLLLVTPPRLREKKFDHHPQQFSSFHHNPAHDSNSLPASPLRIVEDEEYETTQEYEPAQEPVKKLANSRRAKRTKPNGHIANRLEVDSNTSSQSSNSESETEDERVGEDTPFLGIQNPLAASLEATPAFRLADSRTNPAGRFSTQEEIQARLSSVIANQDPIAVXNLNKHIDSPVKLYFI

SEQ ID NO: 517 - protein, 993 aa, Homo Sapiens
  misc_feature (932)..(932): Xaa can be any naturally occurring amino acid
MDMFPLTWVFLALYFSRHQVRGQPDPPCGGRLNSKDAGYITSPGYPQDYPSHQNCEWIVYAPEPNQKIVLNFNPHFEIEKHDCKYDFIEIRDGDSESADLLGKHCGNIAPPTIISSGSMLYIKFTSDYARQGAGFSLRYEIFKTGSEDCSKNFTSPNGTIESPGFPEKYPHNLDCTFTILAKPKMEIILQFLIFDLEHDPLQVGEGDCKYDWLDIWDGIPHVGPLIGKYCGTKTPSELRSSTGILSLTFHTDMAVAKDGFSARYYLVHQEPLENFQCNVPLGMESGRIANEQISASSTYSDGRWTPQQSRLHGDDNGWTPNLDSNKEYLQVDLRFLTMLTAIATQGAISRETQNGYYVKSYKLEVSTNGEDWMVYRHGKNHKVFQANNDATEVVLNKLHAPLLTRFVRIRPQTWHSGIALRLELFGCRVTDAPCSNMLGMLSGLIADSQISASSTQEYLWSPSAARLVSSRSGWFPRIPQAQPGEEWLQVDLGTPKTVKGVIIQGARGGDSITAVEARAFVRKFKVSYSLNGKDWEYIQDPRTQQPKLFEGNMHYDTPDIRRFDPIPAQYVRVYPERWSPAGIGMRLEVLGCDWTDSKPTVETLGPTVKSEETTTPYPTEEEATECGENCSFEDDKDLQLPSGFNCNFDFLEEPCGWMYDHAKWLRTTWASSSSPNDRTFPDDRNFLRLQSDSQREGQYARLISPPVHLPRSPVCMEFQYQATGGRGVALQVVREASQESKLLWVIREDQGGEWKHGRIILPSYDMEYQIVFEGVIGKGRSGEIAIDDIRISTDVPLENCMEPISAFAGENFKVDIPEIHEREGYEDEIDDEYEVDWSNSSSATSGSGAPSTDKEKSWLYTLDPILITIIAMSSLGVLLGATCAGLLLYCTCSYSGLSSRSCTTLENYNFELYDGLKHKVKMNHQKCCSEAXRIAPESYLTFHSSKRGWGRLHFFFLWKLNAIISIKPIQNTEGMDRTEKRVAGGREMQPHRG

SEQ ID NO: 518 - protein, 265 aa, Homo Sapiens
  misc_feature (258)..(258): Xaa can be any naturally occurring amino acid
MSILFYVIFLAYLRGIQGNNMDQRSLPEDSLNSLIIKLIQADILKNKLSKQMVDVKENYQSTLPKAEAPREPERGGPAKSAFQPVIAMDTELLRQQRRYNSPRVLLSDSTPLEPPPLYLMEDYVGSPVVANRTSRRKRYAEHKSHRGEYSVCDSESLWVTDKSSAIDIRGHQVTVLGEIKTGNSPVKQYFYETRCKEARPVKNGCRGIDDKHWNSQCKTSQTYVRALTSENNKLVGWRWIRIDTSCVCALSRKIGRTXIGISPHI

SEQ ID NO: 519 - protein, 217 aa, Homo Sapiens
  misc_feature (211)..(211): Xaa can be any naturally occurring amino acid
MLPLPSCSLPILLLFLLPSVPIESQPPPSTLPPFLAPEWDLLSPRVVLSRGAPAGPPLLFLLEAGAFRESAGAPANRSRRGVSETAPASRRGELAVCDAVSGWVTDRRTAVDLRGREVEVLGEVPAAGGSPLRQYFFETRCKADNAEEGGPGAGGGGCRGVDRRHWVSECKAKQSYVRALTADAQGRVGWRWIRIDTACVCTLLSRTGRAXDPCPGK

SEQ ID NO: 520 - protein, 800 aa, Homo Sapiens
  misc_feature (791)..(791): Xaa can be any naturally occurring amino acid
MLRGGRRGQLGWHSWAAGPGSLLAWLILASAGAAPCPDACCPHGSSGLRCTRDGALDSLHHLPGAENLTELYIENQQHLQHLELRDLRGLGELRNLTIVKSGLRFVAPDAFHFTPRLSRLNLSFNALESLSWKTVQGLSLQELVLSGNPLHCSCALRWLQRWEEEGLGGVPEQKLQCHGQGPLAHMPNASCGVPTLKVQVPNASVDVGDDVLLRCQVEGRGLEQAGWILTELEQSATVMKSGGLPSLGLTLANVTSDLNRKNVTCWAENDVGRAEVSVQVNVSFPASVQLHTAVEMHHWCIPFSVDGQPAPSLRWLFNGSVLNETSFIFTEFLEPAANETVRHGCLRLNQPTHVNNGNYTLLAANPFGQASASIMAAFMDNPFEFNPEDPIPDTNSTSGDPVEKKDETPFGVSVAVGLAVFACLFLSTLLLVLNKCGRRNKFGINRPAVLAPEDGLAMSLHFMTLGGSSLSPTEGKGSGLQGHIIENPQYFSDACVHHIKRRDIVLKWELGEGAFGKVFLAECHNLLPEQDKMLVAVKALKEASESARQDFQREAELLTMLQHQHIVRFFGVCTEGRPLLMVFEYMRHGDLNRFLRSHGPDAKLLAGGEDVAPGPLGLGQLLAVASQVAAGMVYLAGLHFVHRDLATRNCLVGQGLVVKIGDFGMSRDIYSTDYYRVGGRTMLPIRWMPPESILYRKFTTESDVWSFGVVLWEIFTYGKQPWYQLSNTEAIDCITQGRELERPRACPPEVYAIMRGCWQREPQQRHSIKDVHARLQALAQAPPVYLDVLGXGAGPGAGSG

SEQ ID NO: 521 - protein, 806 aa, Homo Sapiens
  misc_feature (797)..(797): Xaa can be any naturally occurring amino acid
MLRGGRRGQLGWHSWAAGPGSLLAWLILASAGAAPCPDACCPHGSSGLRCTRDGALDSLHHLPGAENLTELYIENQQHLQHLELRDLRGLGELRNLTIVKSGLRFVAPDAFHFTPRLSRLNLSFNALESLSWKTVQGLSLQELVLSGNPLHCSCALRWLQRWEEEGLGGVPEQKLQCHGQGPLAHMPNASCGVPTLKVQVPNASVDVGDDVLLRCQVEGRGLEQAGWILTELEQSATVMKSGGLPSLGLTLANVTSDLNRKNVTCWAENDVGRAEVSVQVNVSFPASVQLHTAVEMHHWCIPFSVDGQPAPSLRWLFNGSVLNETSFIFTEFLEPAANETVRHGCLRLNQPTHVNNGNYTLLAANPFGQASASIMAAFMDNPFEFNPEDPIPVSFSPVDTNSTSGDPVEKKDETPFGVSVAVGLAVFACLFLSTLLLVLNKCGRRNKFGINRPAVLAPEDGLAMSLHFMTLGGSSLSPTEGKGSGLQGHIIENPQYFSDACVHHIKRRDIVLKWELGEGAFGKVFLAECHNLLPEQDKMLVAVKALKEASESARQDFQREAELLTMLQHQHIVRFFGVCTEGRPLLMVFEYMRHGDLNRFLRSHGPDAKLLAGGEDVAPGPLGLGQLLAVASQVAAGMVYLAGLHFVHRDLATRNCLVGQGLVVKIGDFGMSRDIYSTDYYRVGGRTMLPIRWMPPESILYRKFTTESDVWSFGVVLWEIFTYGKQPWYQLSNTEAIDCITQGRELERPRACPPEVYAIMRGCWQREPQQRHSIKDVHARLQALAQAPPVYLDVLGXGAGPGAGSG

SEQ ID NO: 522 - protein, 839 aa, Homo Sapiens
  misc_feature (823)..(823): Xaa can be any naturally occurring amino acid
MSSWIRWHGPAMARLWGFCWLVVGFWRAAFACPTSCKCSASRIWCSDPSPGIVAFPRLEPNSVDPENITEIFIANQKRLEIINEDDVEAYVGLRNLTIVDSGLKFVAHKAFLKNSNLQHINFTRNKLTSLSRKHFRHLDLSELILVGNPFTCSCDIMWIKTLQEAKSSPDTQDLYCLNESSKNIPLANLQIPNCGLPSANLAAPNLTVEEGKSITLSCSVAGDPVPNMYWDVGNLVSKHMNETSHTQGSLRITNISSDDSGKQISCVAENLVGEDQDSVNLTVHFAPTITFLESPTSDHHWCIPFTVKGNPKPALQWFYNGAILNESKYICTKIHVTNHTEYHGCLQLDNPTHMNNGDYTLIAKNEYGKDEKQISAHFMGWPGIDDGANPNYPDVIYEDYGTAANDIGDTTNRSNEIPSTDVTDKTGREHLSVYAVVVIASVVGFCLLVMLFLLKLARHSKFGMKGPASVISNDDDSASPLHHISNGSNTPSSSEGGPDAVIIGMTKIPVIENPQYFGITNSQLKPDTFVQHIKRHNIVLKRELGEGAFGKVFLAECYNLCPEQDKILVAVKTLKDASDNARKDFHREAELLTNLQHEHIVKFYGVCVEGDPLIMVFEYMKHGDLNKFLRAHGPDAVLMAEGNPPTELTQSQMLHIAQQIAAGMVYLASQHFVHRDLATRNCLVGENLLVKIGDFGMSRDVYSTDYYRVGGHTMLPIRWMPPESIMYRKFTTESDVWSLGVVLWEIFTYGKQPWYQLSNNEVIECITQGRVLQRPRTCPQEVYELMLGCWQREPHMRKNIKGIHTLLQNLAKASPVYLDILGXGPFPQTDPSQRTPQTG

SEQ ID NO: 523 - protein, 877 aa, Homo Sapiens
  misc_feature (840)..(840): Xaa can be any naturally occurring amino acid
MDVSLCPAKCSFWRIFLLGSVWLDYVGSVLACPANCVCSKTEINCRRPDDGNLFPLLEGQDSGNSNGNASINITDISRNITSIHIENWRSLHTLNAVDMELYTGLQKLTIKNSGLRSIQPRAFAKNPHLRYINLSSNRLTTLSWQLFQTLSLRELQLEQNFFNCSCDIRWMQLWQEQGEAKLNSQNLYCINADGSQLPLFRMNISQCDLPEISVSHVNLTVREGDNAVITCNGSGSPLPDVDWIVTGLQSINTHQTNLNWTNVHAINLTLVNVTSEDNGFTLTCIAENVVGMSNASVALTVYYPPRVVSLEEPELRLEHCIEFVVRGNPPPTLHWLHNGQPLRESKIIHVEYYQEGEISEGCLLFNKPTHYNNGNYTLIAKNPLGTANQTINGHFLKEPFPESTDNFILFDEVSPTPPITVTHKPEEDTFGVSIAVGLAAFACVLLVVLFVMINKYGRRSKFGMKGPVAVISGEEDSASPLHHINHGITTPSSLDAGPDTVVIGMTRIPVIENPQYFRQGHNCHKPDTYVQHIKRRDIVLKRELGEGAFGKVFLAECYNLSPTKDKMLVAVKALKDPTLAARKDFQREAELLTNLQHEHIVKFYGVCGDGDPLIMVFEYMKHGDLNKFLRAHGPDAMILVDGQPRQAKGELGLSQMLHIASQIASGMVYLASQHFVHRDLATRNCLVGANLLVKIGDFGMSRDVYSTDYYRLFNPSGNDFCIWCEVGGHTMLPIRWMPPESIMYRKFTTESDVWSFGVILWEIFTYGKQPWFQLSNTEVIECITQGRVLERPRVCPKEVYDVMLGCWQREPQQRLNIKEIYKILHALGKATPIYLDILGXWWLVVMNSYSVASSLPASHLPSTSQLLPSLTEANIFI

SEQ ID NO: 524 - protein, 441 aa, Homo Sapiens
  misc_feature (421)..(421): Xaa can be any naturally occurring amino acid
MRWRTILLQYCFLLITCLLTALEAVPIDIDKTKVQNIHPVESAKIEPPDTGLYYDEYLKQVIDVLETDKHFREKLQKADIEEIKSGRLSKELDLVSHHVRTKLDELKRQEVGRLRMLIKAKLDSLQDIGMDHQALLKQFDHLNHLNPDKFESTDLDMLIKAATSDLEHYDKTRHEEFKKYEMMKEHERREYLKTLNEEKRKEEESKFEEMKKKHENHPKVNHPGSKDQLKEVWEETDGLDPNDFDPKTFFKLHDVNSDGFLDEQELEALFTKELEKVYDPKNEEDDMVEMEEERLRMREHVMNEVDTNKDRLVTLEEFLKATEKKEFLEPDSWETLDQQQFFTEEELKEYENIIALQENELKKKADELQKQKEELQRQHDQLEAQKLEYHQVIQQMEQKKLQQGIPPSGPAGELKFEPHIXSLKSTRTWKKAVNSTSISSF

SEQ ID NO: 525 - protein, 199 aa, Homo Sapiens
  misc_feature (157)..(157): Xaa can be any naturally occurring amino acid
MGASRLYTLVLVLQPQRVLLGMKKRGFGAGRWNGFGGKVQEGETIEDGARRELQEESGLTVDALHKVGQIVFEFVGEPELMDVHVFCTDSIQGTPVESDEMRPCWFQLDQIPFKDMWPDDSYWFPLLLQKKKFHGYFKFQGQDTILDYTLREVDTVXREPRAAPGQETWLLNSRKPSSPGGIEWRRAGFHLELTGWKGK

SEQ ID NO: 526 - protein, 222 aa, Homo Sapiens
  misc_feature (180)..(180): Xaa can be any naturally occurring amino acid
MSGISPQQMGEPEGSWSGKNPGTMGASRLYTLVLVLQPQRVLLGMKKRGFGAGRWNGFGGKVQEGETIEDGARRELQEESGLTVDALHKVGQIVFEFVGEPELMDVHVFCTDSIQGTPVESDEMRPCWFQLDQIPFKDMWPDDSYWFPLLLQKKKFHGYFKFQGQDTILDYTLREVDTVXREPRAAPGQETWLLNSRKPSSPGGIEWRRAGFHLELTGWKGK

SEQ ID NO: 527 - protein, 680 aa, Homo Sapiens
  misc_feature (652)..(652): Xaa can be any naturally occurring amino acid
MNKLRQSFRRKKDVYVPEASRPHQWQTDEEGVRTGKCSFPVKYLGHVEVDESRGMHICEDAVKRLKAERKFFKGFFGKTGKKAVKAVLWVSADGLRVVDEKTKDLIVDQTIEKVSFCAPDRNFDRAFSYICRDGTTRRWICHCFMAVKDTGERLSHAVGCAFAACLERKQKREKECGVTATFDASRTTFTREGSFRVTTATEQAEREEIMKQMQDAKKAETDKIVVGSSVAPGNTAPSPSSPTSPTSDATTSLEMNNPHAIPRRHAPIEQLARQGSFRGFPALSQKMSPFKRQLSLRINELPSTMQRKTDFPIKNAVPEVEGEAESISSLCSQITNAFSTPEDPFSSAPMTKPVTVVAPQSPTFQANGTDSAFHVLAKPAHTALAPVAMPVRETNPWAHAPDAANKEIAATCSGTEWGQSSGAASPGLFQAGHRRTPSEADRWLEEVSKSVRAQQPQASAAPLQPVLQPPPPTAISQPASPFQGNAFLTSQPVPVGVVPALQPAFVPAQSYPVANGMPYPAPNVPVVGITPSQMVANVFGTAGHPQAAHPHQSPSLVRQQTFPHYEASSATTSPFFKPPAQHLNGSAAFNGVDDGRLASADRHTEVPTGTCPVDPFEAQWAALENKSKQRTNPSPTNPFSSDLQKTFEIELXAIIMAMYLVHTRQGAGGSGQRSKTDFVS

SEQ ID NO: 528 - protein, 632 aa, Homo Sapiens
  misc_feature (604)..(604): Xaa can be any naturally occurring amino acid
MNKLRQSFRRKKDVYVPEASRPHQWQTDEEGVRTGKCSFPVKYLGHVEVDESRGMHICEDAVKRLKAERKFFKGFFGKTGKKAVKAVLWVSADGLRVVDEKTKDLIVDQTIEKVSFCAPDRNFDRAFSYICRDGTTRRWICHCFMAVKDTGERLSHAVGCAFAACLERKQKREKECGVTATFDASRTTFTREGSFRVTTATEQAEREEIMKQMQDAKKAETDKIVVGSSVAPGNTAPSPSSPTSPTSDATTSLEMNNPHAIPRRHAPIEQLARQGSFRGFPALSQKMSPFKRQLSLRINELPSTMQRKTDFPIKNAVPEVEGEAESISSLCSQITNAFSTPEDPFSSAPMTKPVTVVAPQSPTFQGTEWGQSSGAASPGLFQAGHRRTPSEADRWLEEVSKSVRAQQPQASAAPLQPVLQPPPPTAISQPASPFQGNAFLTSQPVPVGVVPALQPAFVPAQSYPVANGMPYPAPNVPVVGITPSQMVANVFGTAGHPQAAHPHQSPSLVRQQTFPHYEASSATTSPFFKPPAQHLNGSAAFNGVDDGRLASADRHTEVPTGTCPVDPFEAQWAALENKSKQRTNPSPTNPFSSDLQKTFEIELXAIIMAMYLVHTRQGAGGSGQRSKTDFVS

SEQ ID NO: 529 - protein, 621 aa, Homo Sapiens
  misc_feature (593)..(593): Xaa can be any naturally occurring amino acid
MNKLRQSFRRKKDVYVPEASRPHQWQTDEEGVRTGKCSFPVKYLGHVEVDESRGMHICEDAVKRLKATGKKAVKAVLWVSADGLRVVDEKTKDLIVDQTIEKVSFCAPDRNFDRAFSYICRDGTTRRWICHCFMAVKDTGERLSHAVGCAFAACLERKQKREKECGVTATFDASRTTFTREGSFRVTTATEQAEREEIMKQMQDAKKAETDKIVVGSSVAPGNTAPSPSSPTSPTSDATTSLEMNNPHAIPRRHAPIEQLARQGSFRGFPALSQKMSPFKRQLSLRINELPSTMQRKTDFPIKNAVPEVEGEAESISSLCSQITNAFSTPEDPFSSAPMTKPVTVVAPQSPTFQGTEWGQSSGAASPGLFQAGHRRTPSEADRWLEEVSKSVRAQQPQASAAPLQPVLQPPPPTAISQPASPFQGNAFLTSQPVPVGVVPALQPAFVPAQSYPVANGMPYPAPNVPVVGITPSQMVANVFGTAGHPQAAHPHQSPSLVRQQTFPHYEASSATTSPFFKPPAQHLNGSAAFNGVDDGRLASADRHTEVPTGTCPVDPFEAQWAALENKSKQRTNPSPTNPFSSDLQKTFEIELXAIIMAMYLVHTRQGAGGSGQRSKTDFVS

SEQ ID NO: 530 - protein, 669 aa, Homo Sapiens
  misc_feature (641)..(641): Xaa can be any naturally occurring amino acid
MNKLRQSFRRKKDVYVPEASRPHQWQTDEEGVRTGKCSFPVKYLGHVEVDESRGMHICEDAVKRLKATGKKAVKAVLWVSADGLRVVDEKTKDLIVDQTIEKVSFCAPDRNFDRAFSYICRDGTTRRWICHCFMAVKDTGERLSHAVGCAFAACLERKQKREKECGVTATFDASRTTFTREGSFRVTTATEQAEREEIMKQMQDAKKAETDKIVVGSSVAPGNTAPSPSSPTSPTSDATTSLEMNNPHAIPRRHAPIEQLARQGSFRGFPALSQKMSPFKRQLSLRINELPSTMQRKTDFPIKNAVPEVEGEAESISSLCSQITNAFSTPEDPFSSAPMTKPVTVVAPQSPTFQANGTDSAFHVLAKPAHTALAPVAMPVRETNPWAHAPDAANKEIAATCSGTEWGQSSGAASPGLFQAGHRRTPSEADRWLEEVSKSVRAQQPQASAAPLQPVLQPPPPTAISQPASPFQGNAFLTSQPVPVGVVPALQPAFVPAQSYPVANGMPYPAPNVPVVGITPSQMVANVFGTAGHPQAAHPHQSPSLVRQQTFPHYEASSATTSPFFKPPAQHLNGSAAFNGVDDGRLASADRHTEVPTGTCPVDPFEAQWAALENKSKQRTNPSPTNPFSSDLQKTFEIELXAIIMAMYLVHTRQGAGGSGQRSKTDFVS

SEQ ID NO: 531 - protein, 423 aa, Homo Sapiens
  misc_feature (346)..(346): Xaa can be any naturally occurring amino acid
MPARALLPRRMGHRTLASTPALWASIPCPRSELRLDLVLPSGQSFRWREQSPAHWSGVLADQVWTLTQTEEQLHCTVYRGDKSQASRPTPDELEAVRKYFQLDVTLAQLYHHWGSVDSHFQEVAQKFQGVRLLRQDPIECLFSFICSSNNNIARITGMVERLCQAFGPRLIQLDDVTYHGFPSLQALAGPEVEAHLRKLGLGYRARYVSASARAILEEQGGLAWLQQLRESSYEEAHKALCILPGVGTKVADCICLMALDKPQAVPVDVHMWHIAQRDYSWHPTTSQAKGPSPQTNKELGNFFRSLWGPYAGWAQAVLFSADLRQSRHAQEPPAKRRKGSKGPEGXMGHPGQRNSPSTFPSIPHFSLPIPTQSHVGEGPPCDYLKGQAPPNQAVSLHNKMGWGILRETALRMVLSSLYYKKEQ

SEQ ID NO: 532 - protein, 333 aa, Homo Sapiens
  misc_feature (321)..(321): Xaa can be any naturally occurring amino acid
MSSCNFTHATFVLIGIPGLEKAHFWVGFPLLSMYVVAMFGNCIVVFIVRTERSLHAPMYLFLCMLAAIDLALSTSTMPKILALFWFDSREISFEACLTQMFFIHALSAIESTILLAMAFDRYVAICHPLRHAAVLNNTVTAQIGIVAVVRGSLFFFPLPLLIKRLAFCHSNVLSHSYCVHQDVMKLAYADTLPNVVYGLTAILLVMGVDVMFISLSYFLIIRTVLQLPSKSERAKAFGTCVSHIGVVLAFYVPLIGLSVVHRFGNSLHPIVRVVMGDIYLLLPPVINPIIYGAKTKQIRTRVLAMFKISCDKDLQAVGGKXPLTLHFSLSLLA

SEQ ID NO: 533 - protein, 276 aa, Homo Sapiens
  misc_feature (253)..(253): Xaa can be any naturally occurring amino acid
MGVLLTQRTLLSLVLALLFPSMASMAAIGSCSKEYRVLLGQLQKQTDLMQDTSRLLDPYIRIQGLDVPKLREHCRERPGAFPSEETLRGLGRRGFLQTLNATLGCVLHRLADLEQRLPKAQDLERSGLNIEDLEKLQMARPNILGLRNNIYCMAQLLDNSDTAEPTKAGRGASQPPTPTPASDAFQRKLEGCRFLHGYHRFMHSVGRVFSKWGESPNRSRRHSPHQALRKGVRRTRPSRKGKRLMTRGQLPRXPREHPLPVKDAAGALWMRGTIAG

SEQ ID NO: 534 - protein, 109 aa, Homo Sapiens
  misc_feature (103)..(103): Xaa can be any naturally occurring amino acid
MSARVRSRSRGRGDGQEAPDVVAFVAPGESQQEEPPTDNQDIEPGQEREGTPPIEERKVEGDCQEMDLEKTRSERGDGSDVKEKTPPNPKHAKTKEAGDGQPXVKKKTS

SEQ ID NO: 535 - protein, 1028 aa, Homo Sapiens
  misc_feature (1015)..(1015): Xaa can be any naturally occurring amino acid
MAESSDKLYRVEYAKSGRASCKKCSESIPKDSLRMAIMVQSPMFDGKVPHWYHFSCFWKVGHSIRHPDVEVDGFSELRWDDQQKVKKTAEAGGVTGKGQDGIGSKAEKTLGDFAAEYAKSNRSTCKGCMEKIEKGQVRLSKKMVDPEKPQLGMIDRWYHPGCFVKNREELGFRPEYSASQLKGFSLLATEDKEALKKQLPGVKSEGKRKGDEVDGVDEVAKKKSKKEKDKDSKLEKALKAQNDLIWNIKDELKKVCSTNDLKELLIFNKQQVPSGESAILDRVADGMVFGALLPCEECSGQLVFKSDAYYCTGDVTAWTKCMVKTQTPNRKEWVTPKEFREISYLKKLKVKKQDRIFPPETSASVAATPPPSTASAPAAVNSSASADKPLSNMKILTLGKLSRNKDEVKAMIEKLGGKLTGTANKASLCISTKKEVEKMNKKMEEVKEANIRVVSEDFLQDVSASTKSLQELFLAHILSPWGAEVKAEPVEVVAPRGKSGAALSKKSKGQVKEEGINKSEKRMKLTLKGGAAVDPDSGLEHSAHVLEKGGKVFSATLGLVDIVKGTNSYYKLQLLEDDKENRYWIFRSWGRVGTVIGSNKLEQMPSKEDAIEHFMKLYEEKTGNAWHSKNFTKYPKKFYPLEIDYGQDEEAVKKLTVNPGTKSKLPKPVQDLIKMIFDVESMKKAMVEYEIDLQKMPLGKLSKRQIQAAYSILSEVQQAVSQGSSDSQILDLSNRFYTLIPHDFGMKKPPLLNNADSVQAKVEMLDNLLDIEVAYSLLRGGSDDSSKDPIDVNYEKLKTDIKVVDRDSEEAEIIRKYVKNTHATTHNAYDLEVIDIFKIEREGECQRYKPFKQLHNRRLLWHGSRTTNFAGILSQGLRIAPPEAPVTGYMFGKGIYFADMVSKSANYCHTSQGDPIGLILLGEVALGNMYELKHASHISKLPKGKHSVKGLGKTTPDPSANISLDGVDVPLGTGISSGVNDTSLLYNEYIVYDIAQVNLKYLLKLKFNFKTSLWXLGEVAESHPVALV

SEQ ID NO: 536 - protein, 444 aa, Homo Sapiens
  misc_feature (365)..(365): Xaa can be any naturally occurring amino acid
MSSAPRSPTPRPRRMKKDESFLGKLGGTLARKRRAREVSDLQEEGKNAINSPMSPALVDVHPEDTQLEENEERTMIDPTSKEDPKFKELVKVLLDWINDVLVEERIIVKQLEEDLYDGQVLQKLLEKLAGCKLNVAEVTQSEIGQKQKLQTVLEAVHDLLRPRGWALRWSVDSIHGKNLVAILHLLVSLAMHFRAPIRLPEHVTVQVVVVRKREGLLHSSHISEELTTTTEMMMGRFERDAFDTLFDHAPDKLSVVKKSLITFVNKHLNKLNLEVTELETQFADGVYLVLLMGLLEDYFVPLHHFYLTPESFDQKVHNVSFAFELMLDGGLKKPKARPEDVVNLDLKSTLRVLYNLFTKYKNVEXRGSCGWWQECPSKKGGIRLCPVPFQGARRHGLLVQAVLTVIPTPPLPHACPTPCLFWLLFLISSPCSSQWARAFENAGF

SEQ ID NO: 537 - protein, 502 aa, Homo Sapiens
  misc_feature (392)..(392): Xaa can be any naturally occurring amino acid
MDLEKNYPTPRTSRTGHGGVNQLGGVFVNGRPLPDVVRQRIVELAHQGVRPCDISRQLRVSHGCVSKILGRYYETGSIKPGVIGGSKPKVATPKVVEKIAEYKRQNPTMFAWEIRDRLLAERVCDNDTVPSVSSINRIIRTKVQQPPNQPVPASSHSIVSTGSVTQVSSVSTDSAGSSYSISGILGITSPSADTNKRKRDEGIQESPVPNGHSLPGRDFLRKQMRGDLFTQQQLEVLDRVFERQHYSDIFTTTEPIKPEQTTEYSAMASLAGGLDDMKANLASPTPADIGSSVPGPQSYPIVTGRDLASTTLPGYPPHVPPAGQGSYSAPTLTGMVPGSEFSGSPYSHPQYSSYNDSWRFPNPGLLGSPYYYSAAARGAAPPAAATAYDRHXPLEPGGHQTLMAPIEGDSHPALLKIAREPMRPSPSIPHLPEAPLFLSSSRDSGALWWGRWTSGCLSISKSQSMSFSRWPLGLCKPIDCPANNRSPSPACLSSSCLTIHPS

SEQ ID NO: 538 - protein, 498 aa, Homo Sapiens
  misc_feature (451)..(451): Xaa can be any naturally occurring amino acid
MPHNSIRSGHGGLNQLGGAFVNGRPLPEVVRQRIVDLAHQGVRPCDISRQLRVSHGCVSKILGRYYETGSIRPGVIGGSKPKVATPKVVEKIGDYKRQNPTMFAWEIRDRLLAEGVCDNDTVPSVSSINRIIRTKVQQPFNLPMDSCVATKSLSPGHTLIPSSAVTPPESPQSDSLGSTYSINGLLGIAQPGSDKRKMDDSDQDSCRLSIDSQSSSSGPRKHLRTDAFSQHHLEPLECPFERQHYPEAYASPSHTKGEQGLYPLPLLNSTLDDGKATLTPSNTPLGRNLSTHQTYPVVADPHSPFAIKQETPEVSSSSSTPSSLSSSAFLDLQQVGSGVPPFNAFPHAASVYGQFTGQALLSGREMVGPTLPGYPPHIPTSGQGSYASSAIAGMVAGSEYSGNAYGHTPYSSYSEAWRFPNSSLLSSPYYYSSTSRPSAPPTTATAFDHLXLPWGQWERLSNRRTQPGTGPRESHKGIFIYYMKNNHKSSIAAHSLCG

SEQ ID NO: 539 - protein, 433 aa, Homo Sapiens
  misc_feature (399)..(399): Xaa can be any naturally occurring amino acid
MPHNSIRSGHGGLNQLGGAFVNGRPLPEVVRQRIVDLAHQGVRPCDISRQLRVSHGCVSKILGRYYETGSIRPGVIGGSKPKVATPKVVEKIGDYKRQNPTMFAWEIRDRLLAEGVCDNDTVPSVSSINRIIRTKVQQPFNLPMDSCVATKSLSPGHTLIPSSAVTPPESPQSDSLGSTYSINGLLGIAQPGSDKRKMDDSDQDSCRLSIDSQSSSSGPRKHLRTDAFSQHHLEPLECPFERQHYPEAYASPSHTKGEQGLYPLPLLNSTLDDGKATLTPSNTPLGRNLSTHQTYPVVAAPPFWICSKSAPGSRPSMPFPMLPPCTGSSRARPSSQGERWWGPRCPDTHPTSPPADRAAMPPLPSQAWWQEVNTLAMPMATPPTPPTARPGASPTPACXVPHIITVPHQGRVHRPPLPRPLTICSCHGDSGSD

SEQ ID NO: 540 - protein, 356 aa, Homo Sapiens
  misc_feature (322)..(322): Xaa can be any naturally occurring amino acid
MPHNSIRSGHGGLNQLGGAFVNGRPLPEVVRQRIVDLAHQGVRPCDISRQLRVSHGCVSKILGRYYETGSIRPGVIGGSKPKVATPKVVEKIGDYKRQNPTMFAWEIRDRLLAEGVCDNDTVPSVSSINRIIRTKVQQPFNLPMDSCVATKSLSPGHTLIPSSAVTPPESPQSDSLGSTYSINGLLGIAQPGSDKRKMDDSDQDSCRLSIDSQSSSSGPRKHLRTDAFSQHHLEPLECPFERQHYPEAYASPSHTKGEQGERWWGPRCPDTHPTSPPADRAAMPPLPSQAWWQEVNTLAMPMATPPTPPTARPGASPTPACXVPHIITVPHQGRVHRPPLPRPLTICSCHGDSGSD

SEQ ID NO: 541 - protein, 322 aa, Homo Sapiens
  misc_feature (288)..(288): Xaa can be any naturally occurring amino acid
MPHNSIRSGHGGLNQLGGAFVNGRPLPEVVRQRIVDLAHQGVRPCDISRQLRVSHGCVSKILGRYYETGSIRPGVIGGSKPKVATPKVVEKIGDYKRQNPTMFAWEIRDRLLAEGVCDNDTVPSVSSINRIIRTKVQQPFNLPMDSCVATKSLSPGHTLIPSSAVTPPESPQSDSLGSTYSINGLLGIAQPGSDKRKMDDSDQDSCRLSIDSQSSSSGPRKHLRTDAFSQHHLEPLECPFERQHYPEAYASPSHTKGEQEVNTLAMPMATPPTPPTARPGASPTPACXVPHIITVPHQGRVHRPPLPRPLTICSCHGDSGSD

SEQ ID NO: 542 - protein, 840 aa, Homo Sapiens
  misc_feature (833)..(833): Xaa can be any naturally occurring amino acid
MSEAGGAGPGGCGAGAGAGAGPGALPPQPAALPPAPPQGSPCAAAAGGSGACGPATAVAAAGTAEGPGGGGSARIAVKKAQLRSAPRAKKLEKLGVYSACKAEESCKCNGWKNPNPSPTPPRADLQQIIVSLTESCRSCSHALAAHVSHLENVSEEEMNRLLGIVLDVEYLFTCVHKEEDADTKQVYFYLFKLLRKSILQRGKPVVEGSLEKKPPFEKPSIEQGVNNFVQYKFSHLPAKERQTIVELAKMFLNRINYWHLEAPSQRRLRSPNDDISGYKENYTRWLCYCNVPQFCDSLPRYETTQVFGRTLLRSVFTVMRRQLLEQARQEKDKLPLEKRTLILTHFPKFLSMLEEEVYSQNSPIWDQDFLSASSRTSQLGIQTVINPPPVAGTISYNSTSSSLEQPNAGSSSPACKASSGLEANPGEKRKMTDSHVLEEAKKPRVMGDIPMELINEVMSTITDPAAMLGPETNFLSAHSARDEAARLEERRGVIEFHVVGNSLNQKPNKKILMWLVGLQNVFSHQLPRMPKEYITRLVFDPKHKTLALIKDGRVIGGICFRMFPSQGFTEIVFCAVTSNEQVKGYGTHLMNHLKEYHIKHDILNFLTYADEYAIGYFKKQGFSKEIKIPKTKYVGYIKDYEGATLMGCELNPRIPYTEFSVIIKKQKEIIKKLIERKQAQIRKVYPGLSCFKDGVRQIPIESIPGIRETGWKPSGKEKSKEPRDPDQLYSTLKSILQQVKSHQSAWPFMEPVKRTEAPGYYEVIRFPMDLKTMSERLKNRYYVSKKLFMADLQRVFTNCKEYNPPESEYYKCANILEKFFFSKIKEAGLIDKXFFFPSAS

SEQ ID NO: 543 - protein, 306 aa, Homo Sapiens
  misc_feature (262)..(262): Xaa can be any naturally occurring amino acid
MFEARLVQGSILKKVLEALKDLINEACWDISSSGVNLQSMDSSHVSLVQLTLRSEGFDTYRCDRNLAMGVNLTSMSKILKCAGNEDIITLRAEDNADTLALVFEAPNQEKVSDYEMKLMDLDVEQLGIPEQEYSCVVKMPSGEFARICRDLSHIGDAVVISCAKDGVKFSASGELGNGNIKLSQTSNVDKEEEAVTIEMNEPVQLTFALRYLNFFTKATPLSSTVTLSMSADVPLVVEYKIADMGHLKYYLAPKIEDEEGSXAFLKFKKIKLSSLRTASKMPAYTEVFSVTKFVPLSTYVDIVFCK

SEQ ID NO: 544 - protein, 1152 aa, Homo Sapiens
  misc_feature (1107)..(1107): Xaa can be any naturally occurring amino acid
MRLPGAMPALALKGELLLLSLLLLLEPQISQGLVVTPPGPELVLNVSSTFVLTCSGSAPVVWERMSQEPPQEMAKAQDGTFSSVLTLTNLTGLDTGEYFCTHNDSRGLETDERKRLYIFVPDPTVGFLPNDAEELFIFLTEITEITIPCRVTDPQLVVTLHEKKGDVALPVPYDHQRGFSGIFEDRSYICKTTIGDREVDSDAYYVYRLQVSSINVSVNAVQTVVRQGENITLMCIVIGNEVVNFEWTYPRKESGRLVEPVTDFLLDMPYHIRSILHIPSAELEDSGTYTCNVTESVNDHQDEKAINITVVESGYVRLLGEVGTLQFAELHRSRTLQVVFEAYPPPTVLWFKDNRTLGDSSAGEIALSTRNVSETRYVSELTLVRVKVAEAGHYTMRAFHEDAEVQLSFQLQINVPVRVLELSESHPDSGEQTVRCRGRGMPQPNIIWSACRDLKRCPRELPPTLLGNSSEEESQLETNVTYWEEEQEFEVVSTLRLQHVDRPLSVRCTLRNAVGQDTQEVIVVPHSLPFKVVVISAILALVVLTIISLIILIMLWQKKPRYEIRWKVIESVSSDGHEYIYVDPMQLPYDSTWELPRDQLVLGRTLGSGAFGQVVEATAHGLSHSQATMKVAVKMLKSTARSSEKQALMSELKIMSHLGPHLNVVNLLGACTKGGPIYIITEYCRYGDLVDYLHRNKHTFLQHHSDKRRPPSAELYSNALPVGLPLPSHVSLTGESDGGYMDMSKDESVDYVPMLDMKGDVKYADIESSNYMAPYDNYVPSAPERTCRATLINESPVLSYMDLVGFSYQVANGMEFLASKNCVHRDLAARNVLICEGKLVKICDFGLARDIMRDSNYISKGSTFLPLKWMAPESIFNSLYTTLSDVWSFGILLWEIFTLGGTPYPELPMNEQFYNAIKRGYRMAQPAHASDEIYEIMQKCWEEKFEIRPPFSQLVLLLERLLGEGYKKKYQQVDEEFLRSDHPAILRSQARLPGFHGLRSPLDTSSVLYTAVQPNEGDNDYIIPLPDPKPEVADEGPLEGSPSLASSTLNEVNTSSTISCDSPLEPQDEPEPEPQLELQVEPEPELEQLPDSGCPAPRAEAEDSFLXGAGPYPALPEAPPLPAPSISWPGLTGLPVSQAALISCPLLEAFCS

SEQ ID NO: 545 - protein, 792 aa, Homo Sapiens
  misc_feature (770)..(770): Xaa can be any naturally occurring amino acid
MGCNMCVVQKPEEQYKVMLQVNGKELSKLSQEQTLQALRSSKEPLVIQVLRRSPRLRGDSSCHDLQLVDSGTQTDITFEHIMALGKLRPPTPPMVILEPPPISHEYYDPAEFMEGGPQEADRLDELEYEEVELYKSSHRDKLGLMVCYRTDDEEDLGIYVGEVNPNSIAAKDGRIREGDRIIQINGVDVQNREEAVAILSQEENTNISLLVARPESQLAKRWKDSDRDDFLDDFGSENEGELRARKLKSPPAQQPGNEEEKGAPDAGPGLSNSQELDSGVGRTDESTRNEESSEHDLLGDEPPSSTNTPGSLRKFGLQGDALQSRDFHFSMDSLLAEGAGLGGGDVPGLTDEEYERYRELLEIKCHLENGNQLGLLFPRASGGNSALDVNRNESLGHEMAMLEEELRHLEFKCRNILRAQKMQQLRERCMKAWLLEEESLYDLAASEPKKHELSDISELPEKSDKDSTSAYNTGESCRSTPLLVEPLPESPLRRAMAGNSNLNRTPPGPAVATPAKAAPPPGSPAKFRSLSRDPEAGRRQHAEERGRRNPKTGLTLERVGPESSPYLSRRHRGQGQEGEHYHSCVQLAPTRGLEELGHGPLSLAGGPRVGGVAAAATEAPRMEWKVKVRSDGTRYVAKRPVRDRLLKARALKIREERSGMTTDDDAVSEMKMGRYWSKEERKQHLIRAREQRKRREFMMQSRLECLREQQNGDSKPELNIIALSHRKTMKKRNKKILDNWITIQEMLAHGARSADGKRVYNPLLSVTTVXAARAGTRPRPREPPGAPALTLL

SEQ ID NO: 546 - protein, 1036 aa, Homo Sapiens
  misc_feature (1013)..(1013): Xaa can be any naturally occurring amino acid
MTKHPPNRRGISFEVGAQLEARDRLKNWYPAHIEDIDYEEGKVLIHFKRWNHRYDEWFCWDSPYLRPLEKIQLRKEGLHEEDGSSEFQINEQVLACWSDCRFYPAKVTAVNKDGTYTVKFYDGVVQTVKHIHVKAFSKDQNIVGNARPKETDHKSLSSSPDKREKFKEQRKATVNVKKDKEDKPLKTEKRPKQPDKEGKLICSEKGKVSEKSLPKNEKEDKENISENDREYSGDAQVDKKPENDIVKSPQENLREPKRKRGRPPSIAPTAVDSNSQTLQPITLELRRRKISKGCEVPLKRPRLDKNSSQEKSKNYSENTDKDLSRRRSSRLSTNGTHEILDPDLVVSDLVDTDPLQDTLSSTKESEEGQLKSALEAGQVSSALTCHSFGDGSGAAGLELNCPSMGENTMKTEPTSPLVELQEISTVEVTNTFKKTDDFGSSNAPAVDLDHKFRCKVVDCLKFFRKAKLLHYHMKYFHGMEKSLEPEESPGKRHVQTRGPSASDKPSQETLTRKRVSASSPTTKDKEKNKEKKFKEFVRVKPKKKKKKKKKTKPECPCSEEISDTSQEPSPPKAFAVTRCGSSHKPGVHMSPQLHGPESGHHKGKVKALEEDNLSESSSESFLWSDDEYGQDVDVTTNPDEELDGDDRYDFEVVRCICEVQEENDFMIQCEECQCWQHGVCMGLLEENVPEKYTCYVCQDPPGQRPGFKYWYDKEWLSRGHMHGLAFLEENYSHQNAKKIVATHQLLGDVQRVIEVLHGLQLKMSILQSREHPDLPLWCQPWKQHSGEGRSHFRNIPVTDTRSKEEAPSYRTLNGAVEKPRPLALPLPRSVEESYITSEHCYQKPRAYYPAVEQKLVVETRGSALDDAVNPLHENGDDSLSPRLGWPLDQDRSKGDSDPKPGSPKVKEYVSKKALPEEAPARKLLDRGGEGLLSSQHQWQFNLLTHVESLQDEVTHRMDSIEKELDVLESWLDYTGELEPPEPLARLPQLKHCIKQLLMDLGKVQQIALCCSTXNWAPKTHGGTILGHLQEELRIFK

SEQ ID NO: 547 - protein, 753 aa, Homo Sapiens
  misc_feature (725)..(725): Xaa can be any naturally occurring amino acid
MSAEGYQYRALYDYKKEREEDIDLHLGDILTVNKGSLVALGFSDGQEARPEEIGWLNGYNETTGERGDFPGTYVEYIGRKKISPPTPKPRPPRPLPVAPGSSKTEADVEQQALTLPDLAEQFAPPDIAPPLLIKLVEAIEKKGLECSTLYRTQSSSNLAELRQLLDCDTPSVDLEMIDVHVLADAFKRYLLDLPNPVIPAAVYSEMISLAPEVQSSEEYIQLLKKLIRSPSIPHQYWLTLQYLLKHFFKLSQTSSKNLLNARVLSEIFSPMLFRFSAASSDNTENLIKVIEILISTEWNERQPAPALPPKPPKPTTVANNGMNNNMSLQDAEWYWGDISREEVNEKLRDTADGTFLVRDASTKMHGDYTLTLRKGGNNKLIKIFHRDGKYGFSDPLTFSSVVELINHYRNESLAQYNPKLDVKLLYPVSKYQQDQVVKEDNIEAVGKKLHEYNTQFQEKSREYDRLYEEYTRTSQEIQMKRTAIEAFNETIKIFEEQCQTQERYSKEYIEKFKREGNEKEIQRIMHNYDKLKSRISEIIDSRRRLEEDLKKQAAEYREIDKRMNSIKPDLIQLRKTRDQYLMWLTQKGVRQKKLNEWLGNENTEDQYSLVEDDEDLPHHDEKTWNVGSSNRNKAENLLRGKRDGTFLVRESSKQGCYACSVVVDGEVKHCVINKTATGYGFAEPYNLYSSLKELVLHYQHTSLVQHNDSLNVTLAYPVYAQQRRXSAYSLILLLKFSHPEASGKQRAPLQSDL

SEQ ID NO: 548 - protein, 453 aa, Homo Sapiens
  misc_feature (425)..(425): Xaa can be any naturally occurring amino acid
MHNLQTLPPKPPKPTTVANNGMNNNMSLQDAEWYWGDISREEVNEKLRDTADGTFLVRDASTKMHGDYTLTLRKGGNNKLIKIFHRDGKYGFSDPLTFSSVVELINHYRNESLAQYNPKLDVKLLYPVSKYQQDQVVKEDNIEAVGKKLHEYNTQFQEKSREYDRLYEEYTRTSQEIQMKRTAIEAFNETIKIFEEQCQTQERYSKEYIEKFKREGNEKEIQRIMHNYDKLKSRISEIIDSRRRLEEDLKKQAAEYREIDKRMNSIKPDLIQLRKTRDQYLMWLTQKGVRQKKLNEWLGNENTEDQYSLVEDDEDLPHHDEKTWNVGSSNRNKAENLLRGKRDGTFLVRESSKQGCYACSVVVDGEVKHCVINKTATGYGFAEPYNLYSSLKELVLHYQHTSLVQHNDSLNVTLAYPVYAQQRRXSAYSLILLLKFSHPEASGKQRAPLQSDL

SEQ ID NO: 549 - protein, 351 aa, Homo Sapiens
  misc_feature (314)..(314): Xaa can be any naturally occurring amino acid
MLLSKINSLAHLRAAPCNDLHATKLAPGKEKEPLESQYQVGPLLGSGGFGSVYSGIRVSDNLPVAIKHVEKDRISDWGELPNGTRVPMEVVLLKKVSSGFSGVIRLLDWFERPDSFVLILERPEPVQDLFDFITERGALQEELARSFFWQVLEAVRHCHNCGVLHRDIKDENILIDLNRGELKLIDFGSGALLKDTVYTDFDGTRVYSPPEWIRYHRYHGRSAAVWSLGILLYDMVCGDIPFEHDEEIIRGQVFFRQRVSSECQHLIRWCLALRPSDRPTFEEIQNHPWMQDVLLPQETAEIHLHSLSPGPSKXQPFWQVLPSLVRCPREGKLLSPASRVPVTRLAKQDSA

SEQ ID NO: 550 - protein, 349 aa, Homo Sapiens
  misc_feature (312)..(312): Xaa can be any naturally occurring amino acid
MLTKPLQGPPAPPGTPTPPPGGKDREAFEAEYRLGPLLGKGGFGTVFAGHRLTDRLQVAIKVIPRNRVLGWSPLSDSVTCPLEVALLWKVGAGGGHPGVIRLLDWFETQEGFMLVLERPLPAQDLFDYITEKGPLGEGPSRCFFGQVVAAIQHCHSRGVVHRDIKDENILIDLRRGCAKLIDFGSGALLHDEPYTDFDGTRVYSPPEWISRHQYHALPATVWSLGILLYDMVCGDIPFERDQEILEAELHFPAHVSPDCCALIRRCLAPKPSSRPSLEEILLDPWMQTPAEDVPLNPSKGGPAPLAWSLLPXAWPGLAWPPMVRRAIPWPCHRDRWTFVDLVLQVITSH

SEQ ID NO: 551 - protein, 363 aa, Homo Sapiens
  misc_feature (327)..(327): Xaa can be any naturally occurring amino acid
MLLSKFGSLAHLCGPGGVDHLPVKILQPAKADKESFEKAYQVGAVLGSGGFGTVYAGSRIADGLPVAVKHVVKERVTEWGSLGGATVPLEVVLLRKVGAAGGARGVIRLLDWFERPDGFLLVLERPEPAQDLFDFITERGALDEPLARRFFAQVLAAVRHCHSCGVVHRDIKDENLLVDLRSGELKLIDFGSGALLKDTVYTDFDGTRVYSPPEWIRYHRYHGRSATVWSLGVLLYDMVCGDIPFEQDEEILRGRLLFRRRVSPECQQLIRWCLSLRPSERPSLDQIAAHPWMLGADGGAPESCDLRLCTLDPDDVASTTSSSESLXGAAPDWELGDHLPWPDLGRPQTLTFSCVGRLLLRKQ

SEQ ID NO: 552 - protein, 238 aa, Homo Sapiens
  misc_feature (164)..(164): Xaa can be any naturally occurring amino acid
MADEEKLPPGWEKRMSRSSGRVYYFNHITNASQWERPSGNSSSGGKNGQGEPARVRCSHLLVKHSQSRRPSSWRQEKITRTKEEALELINGYIQKIKSGEEDFESLASQFSDCSSAKARGDLGAFSRGQMQKPFEDASFALRTGEMSGPVFTDSGIHIILRTEXGWGAQAWPRGRAGRLGRPAPPCPPASGRTPHSLPPSHSIYCSHNGWEGALPDWGPWGPHSLSIPSWGCDRQILP

SEQ ID NO: 553 - protein, 444 aa, Homo Sapiens
  misc_feature (417)..(417): Xaa can be any naturally occurring amino acid
MSSNCTSTTAVAVAPLSASKTKTKKKHFVCQKVKLFRASEPILSVLMWGVNHTINELSNVPVPVMLMPDDFKAYSKIKVDNHLFNKENLPSRFKFKEYCPMVFRNLRERFGIDDQDYQNSVTRSAPINSDSQGRCGTRFLTTYDRRFVIKTVSSEDVAEMHNILKKYHQFIVECHGNTLLPQFLGMYRLTVDGVETYMVVTRNVFSHRLTVHRKYDLKGSTVAREASDKEKAKDLPTFKDNDFLNEGQKLHVGEESKKNFLEKLKRDVEFLAQLKIMDYSLLVGIHDVDRAEQEEMEVEERAEDEECENDGVGGNLLCSYGTPPDSPGNLLSFPRFFGPGEFDPSVDVYAMKSHESSPKKEVYFMAIIDILTPYDTKKKAAHAAKTVKHGAGAEISTVNPEQYSKRFNEFMSNILTXFSSTFSQSQRAGYGVGDRELGRRVYLG

SEQ ID NO: 554 - protein, 557 aa, Homo Sapiens
  misc_feature (532)..(532): Xaa can be any naturally occurring amino acid
MSKPHSEAGTAFIQTQQLHAAMADTFLEHMCRLDIDSPPITARNTGIICTIGPASRSVETLKEMIKSGMNVARLNFSHGTHEYHAETIKNVRTATESFASDPILYRPVAVALDTKGPEIRTGLIKGSGTAEVELKKGATLKITLDNAYMEKCDENILWLDYKNICKVVEVGSKIYVDDGLISLQVKQKGADFLVTEVENGGSLGSKKGVNLPGAAVDLPAVSEKDIQDLKFGVEQDVDMVFASFIRKASDVHEVRKVLGEKGKNIKIISKIENHEGVRRFDEILEASDGIMVARGDLGIEIPAEKVFLAQKMMIGRCNRAGKPVICATQMLESMIKKPRPTRAEGSDVANAVLDGADCIMLSGETAKGDYPLEAVRMQHLIAREAEAAIYHLQLFEELRRLAPITSDPTEATAVGAVEASFKCCSGAIIVLTKSGRSAHQVARYRPRAPIIAVTRNPQTARQAHLYRGIFPVLCKDPVQEAWAEDVDLRVNFAMNVGKARGFFKKGDVVIVLTGWRPGSGFTNTMRVVPVPXWTPEPLLQPLSHPLPPAHPLGQQRL

SEQ ID NO: 555 - protein, 291 aa, Homo Sapiens
  misc_feature (278)..(278): Xaa can be any naturally occurring amino acid
MGLLECCARCLVGAPFASLVATGLCFFGVALFCGCGHEALTGTEKLIETYFSKNYQDYEYLINVIHAFQYVIYGTASFFFLYGALLLAEGFYTTGAVRQIFGDYKTTICGKGLSATVTGGQKGRGSRGQHQAHSLERVCHCLGKWLGHPDKFVGITYALTVVWLLVFACSAVPVYIYFNTWTTCQSIAFPSKTSASIGSLCADARMYGVLPWNAFPGKVCGSNLLSICKTAEFQMTFHLFIAAFVGAAATLVSLLTFMIAATYNFAVLKLMGRGTKFXSPVEIPLSLIARL

SEQ ID NO: 556 - protein, 256 aa, Homo Sapiens
  misc_feature (243)..(243): Xaa can be any naturally occurring amino acid
MGLLECCARCLVGAPFASLVATGLCFFGVALFCGCGHEALTGTEKLIETYFSKNYQDYEYLINVIHAFQYVIYGTASFFFLYGALLLAEGFYTTGAVRQIFGDYKTTICGKGLSATFVGITYALTVVWLLVFACSAVPVYIYFNTWTTCQSIAFPSKTSASIGSLCADARMYGVLPWNAFPGKVCGSNLLSICKTAEFQMTFHLFIAAFVGAAATLVSLLTFMIAATYNFAVLKLMGRGTKFXSPVEIPLSLIARL

SEQ ID NO: 557 - protein, 653 aa, Homo Sapiens
  misc_feature (634)..(634): Xaa can be any naturally occurring amino acid
MEPAPARSPRPQQDPARPQEPTMPPPETPSEGRQPSPSPSPTERAPASEEEFQFLRCQQCQAEAKCPKLLPCLHTLCSGCLEASGMQCPICQAPWPLGADTPALDNVFFESLQRRLSVYRQIVDAQAVCTRCKESADFWCFECEQLLCAKCFEAHQWFLKHEARPLAELRNQSVREFLDGTRKTNNIFCSNPNHRTPTLTSIYCRGCSKPLCCSCALLDSSHSELKCDISAEIQQRQEELDAMTQALQEQDSAFGAVHAQMHAAVGQLGRARAETEELIRERVRQVVAHVRAQERELLEAVDARYQRDYEEMASRLGRLDAVLQRIRTGSALVQRMKCYASDQEVLDMHGFLRQALCRLRQEEPQSLQAAVRTDGFDEFKVRLQDLSSCITQGKDAAVSKKASPEAASTPRDPIDVDLPEEAERVKAQVQALGLAEAQPMAVVQSVPGAHPVPVYAFSIKGPSYGEDVSNTTTAQKRKCSQTQCPRKVIKMESEEGKEARLARSSPEQPRPSTSKAVSPPHLDGPPSPRSPVIGSEVFLPNSNHVASGAGEAEERVVVISSSEDSDAENSSSRELDDSSSESSDLQLEGPSTLRVLDENLADPQAEDRPLVFFDLKIDNESGFSWGYPHPFLIXSLSPKKKCRQSHLPGPGEL

SEQ ID NO: 558 - protein, 606 aa, Homo Sapiens
  misc_feature (561)..(561): Xaa can be any naturally occurring amino acid
MEPAPARSPRPQQDPARPQEPTMPPPETPSEGRQPSPSPSPTERAPASEEEFQFLRCQQCQAEAKCPKLLPCLHTLCSGCLEASGMQCPICQAPWPLGADTPALDNVFFESLQRRLSVYRQIVDAQAVCTRCKESADFWCFECEQLLCAKCFEAHQWFLKHEARPLAELRNQSVREFLDGTRKTNNIFCSNPNHRTPTLTSIYCRGCSKPLCCSCALLDSSHSELKCDISAEIQQRQEELDAMTQALQEQDSAFGAVHAQMHAAVGQLGRARAETEELIRERVRQVVAHVRAQERELLEAVDARYQRDYEEMASRLGRLDAVLQRIRTGSALVQRMKCYASDQEVLDMHGFLRQALCRLRQEEPQSLQAAVRTDGFDEFKVRLQDLSSCITQGKDAAVSKKASPEAASTPRDPIDVDLPEEAERVKAQVQALGLAEAQPMAVVQSVPGAHPVPVYAFSIKGPSYGEDVSNTTTAQKRKCSQTQCPRKVIKMESEEGKEARLARSSPEQPRPSTSKAVSPPHLDGPPSPRSPVIGSEVFLPNSNHVASGAGEAGRERNALWXSAARKTQMPKTRAWSPWRPPSHSPRQPTPRQPTPRQPTPRQSSLC

SEQ ID NO: 559 - protein, 170 aa, Homo Sapiens
  misc_feature (161)..(161): Xaa can be any naturally occurring amino acid
MLLLLLSIIVLHVAVLVLLFVSTIVSQWIVGNGHATDLWQNCSTSSSGNVHHCFSSSPNEWLQSVQATMILSIIFSILSLFLFFCQLFTLTKGGRFYITGIFQILAGLCVMSAAAIYTVRHPEWHLNSDYSYGFAYILAWVAFPLALLSGVIYVILRKREXGAQTVCLRL

SEQ ID NO: 560 - protein, 300 aa, Homo Sapiens
  misc_feature (283)..(283): Xaa can be any naturally occurring amino acid
MSGADRSPNAGAAPDSAPGQAAVASAYQRFEPRAYLRNNYAPPRGDLCNPNGVGPWKLRCLAQTFATGEVSGRTLIDIGSGPTVYQLLSACSHFEDITMTDFLEVNRQELGRWLQEEPGAFNWSMYSQHACLIEGKGECWQDKERQLRARVKRVLPIDVHQPQPLGAGSPAPLPADALVSAFCLEAVSPDLASFQRALDHITTLLRPGGHLLLIGALEESWYLAGEARLTVVPVSEEEVREALVRSGYKVRDLRTYIMPAHLQTGVDDVKGVFFAWAQKVGLXGLYLVPCGPHPPGFPVL

SEQ ID NO: 561 - protein, 849 aa, Homo Sapiens
  misc_feature (837)..(837): Xaa can be any naturally occurring amino acid
MIPFLPMFSLLLLLIVNPINANNHYDKILAHSRIRGRDQGPNVCALQQILGTKKKYFSTCKNWYKKSICGQKTTVLYECCPGYMRMEGMKGCPAVLPIDHVYGTLGIVGATTTQRYSDASKLREEIEGKGSFTYFAPSNEAWDNLDSDIRRGLESNVNVELLNALHSHMINKRMLTKDLKNGMIIPSMYNNLGLFINHYPNGVVTVNCARIIHGNQIATNGVVHVIDRVLTQIGTSIQDFIEAEDDLSSFRAAAITSDILEALGRDGHFTLFAPTNEAFEKLPRGVLERFMGDKVASEALMKYHILNTLQCSESIMGGAVFETLEGNTIEIGCDGDSITVNGIKMVNKKDIVTNNGVIHLIDQVLIPDSAKQVIELAGKQQTTFTDLVAQLGLASALRPDGEYTLLAPVNNAFSDDTLSMVQRLLKLILQNHILKVKVGLNELYNGQILETIGGKQLRVFVYRTAVCIENSCMEKGSKQGRNGAIHIFREIIKPAEKSLHEKLKQDKRFSTFLSLLEAADLKELLTQPGDWTLFVPTNDAFKGMTSEEKEILIRDKNALQNIILYHLTPGVFIGKGFEPGVTNILKTTQGSKIFLKEVNDTLLVNELKSKESDIMTTNGVIHVVDKLLYPADTPVGNDQLLEILNKLIKYIQIKFVRGSTFKEIPVTVYTTKIITKVVEPKIKVIEGSLQPIIKTEGPTLTKVKIEGEPEFRLIKEGETITEVIHGEPIIKKYTKIIDGVPVEITEKETREERIITGPEIKYTRISTGGGETEETLKKLLQEEVTKVTKFIEGGDGHLFEDEEIKRLLQGDTPVRKLQANKKVQGSRRRLREGRSQXKSKNQKKMFIQP

SEQ ID NO: 562 - protein, 560 aa, Homo Sapiens
  misc_feature (464)..(464): Xaa can be any naturally occurring amino acid
MVHSSMGAPEIRMSKPLEAEKQGLDSPSEHTDTERNGPDTNHQNPQNKTSPFSVSPTGPSTKIKAEDPSGDSAPAAPLPPQPAQPHLPQAQLMLTGSQLAGDIQQLLQLQQLVLVPGHHLQPPAQFLLPQAQQSQPGLLPTPNLFQLPQQTQGALLTSQPRAGLPTQPPKCLEPPSHPEEPSDLEELEQFARTFKQRRIKLGFTQGDVGLAMGKLYGNDFSQTTISRFEALNLSFKNMCKLKPLLEKWLNDAETMSVDSSLPSPNQLSSPSLGFDGLPGRRRKKRTSIETNVRFALEKSFLANQKPTSEEILLIAEQLHMEKEVIRVWFCNRRQKEKRINPCSAAPMLPSPGKPASYSPHMVTPQGGAGTLPLSQASSSLSTTVTTLSSAVGTLHPSRTAGGGGGGGGAAPPLNSIPSVTPPPPATTNSTNPSPQGSHSAIGLSGLNPSTGPGLWWNPAPYQPXWQRESGAGGSRCSPGEPWPGDLAALLESCWAAPAQHPAWCGPGLSSGCGCGSLHLQQVSWPLLLILFILILLLLHLQRDGSTDPWRSRGARGRVQT

SEQ ID NO: 563 - protein, 319 aa, Homo Sapiens
  misc_feature (306)..(306): Xaa can be any naturally occurring amino acid
MSALLRLLRTGAPAAACLRLGTSAGTGSRRAMALYHTEERGQPCSQNYRLFFKNVTGHYISPFHDIPLKVNSKEENGIPMKKARNDEYENLFNMIVEIPRWTNAKMEIATKEPMNPIKQYVKDGKLRYVANIFPYKGYIWNYGTLPQILSCGEVIHVKILGILALIDEGETDWKLIAINANDPEASKFHDIDDVKKFKPGYLEATLNWFRLYKVPDGKPENQFAFNGEFKNKAFALEVIKSTHQCWKALLMKKCNGGAINCTNVQISDSPFRCTQEEARSLVESVSSSPNKESNEEEQVWHFLGKXLKHLKFCCQDSHL

SEQ ID NO: 564 - protein, 348 aa, Homo Sapiens
  misc_feature (335)..(335): Xaa can be any naturally occurring amino acid
MSALLRLLRTGAPAAACLRLGTSAGTGSRRAMALYHTEERGQPCSQNYRLFFKNVTGHYISPFHDIPLKVNSKEENGIPMKKARNDEYENLFNMIVEIPRWTNAKMEIATKEPMNPIKQYVKDGKLRYVANIFPYKGYIWNYGTLPQTWEDPHEKDKSTNCFGDNDPIDVCEIGSKILSCGEVIHVKILGILALIDEGETDWKLIAINANDPEASKFHDIDDVKKFKPGYLEATLNWFRLYKVPDGKPENQFAFNGEFKNKAFALEVIKSTHQCWKALLMKKCNGGAINCTNVQISDSPFRCTQEEARSLVESVSSSPNKESNEEEQVWHFLGKXLKHLKFCCQDSHL

SEQ ID NO: 565 - protein, 544 aa, Homo Sapiens
  misc_feature (506)..(506): Xaa can be any naturally occurring amino acid
MGETLGDSPIDPESDSFTDTLSANISQEMTMVDTEMPFWPTNFGISSVDLSVMEDHSHSFDIKPFTTVDFSSISTPHYEDIPFTRTDPVVADYKYDLKLQEYQSAIKVEPASPPYYSEKTQLYNKPHEEPSNSLMAIECRVCGDKASGFHYGVHACEGCKGFFRRTIRLKLIYDRCDLNCRIHKKSRNKCQYCRFQKCLAVGMSHNAIRFGRMPQAEKEKLLAEISSDIDQLNPESADLRALAKHLYDSYIKSFPLTKAKARAILTGKTTDKSPFVIYDMNSLMMGEDKIKFKHITPLQEQSKEVAIRIFQGCQFRSVEAVQEITEYAKSIPGFVNLDLNDQVTLLKYGVHEIIYTMLASLMNKDGVLISEGQGFMTREFLKSLRKPFGDFMEPKFEFAVKFNALELDDSDLAIFIAVIILSGDRPGLLNVKPIEDIQDNLLQALELQLKLNHPESSQLFAKLLQKMTDLRQIVTEHVQLLQVIKKTETDMSLHPLLQEIYKDLYXQRVLSHCQHFPSSSCTILRENLTPKKFTVKKHFKKKRF

SEQ ID NO: 566 - protein, 802 aa, Homo Sapiens
  misc_feature (799)..(799): Xaa can be any naturally occurring amino acid
MAWDMCNQDSESVWSDIECAALVGEDQPLCPDLPELDLSELDVNDLDTDSFLGGLKWCSDQSEIISNQYNNEPSNIFEKIDEENEANLLAVLTETLDSLPVDEDGLPSFDALTDGDVTTDNEASPSSMPDGTPPPQEAEEPSLLKKLLLAPANTQLSYNECSGLSTQNHANHNHRIRTNPAIVKTENSWSNKAKSICQQQKPQRRPCSELLKYLTTNDDPPHTKPTENRNSSRDKCTSKKKSHTQSQSQHLQAKPTTLSLPLTPESPNDPKGSPFENKTIERTLSVELSGTAGLTPPTTPPHKANQDNPFRASPKLKSSCKTVVPPPSKKPRYSESSGTQGNNSTKKGPEQSELYAQLSKSSVLTGGHEERKTKRPSLRLFGDHDYCQSINSKTEILINISQELQDSRQLENKDVSSDWQGQICSSTDSDQCYLRETLEASKQVSPCSTRKQLQDQEIRAELNKHFGHPSQAVFDDEADKTGELRDSDFSNEQFSKLPMFINSGLAMDGLFDDSEDESDKLSYPWDGTQSYSLFNVSPSCSSFNSPCRDSVSPPKSLFSQRPQRMRSRSRSFSRHRSCSRSPYSRSRSRSPGSRSSSRSCYYYESSHYRHRTHRNSPLYVRSRSRSPYSRRPRYDSYEEYQHERLKREEYRREYEKRESERAKQRERQRQKAIEERRVIYVGKIRPDTTRTELRDRFEVFGEIEECTVNLRDDGDSYGFITYRYTCDAFAALENGYTLRRSNETDFELYFCGRKQFFKSNYADLDSNSDDFDPASTKSKYDSLDFDSLLKEAQRSLRRXHVP

SEQ ID NO: 567 - protein, 611 aa, Homo Sapiens
  misc_feature (606)..(606): Xaa can be any naturally occurring amino acid
MAGLYSLGVSVFSDQGGRKYMEDVTQIVVEPEPTAEEKPSPRRSLSQPLPPRPSPAALPGGEVSGKGPAVAAREARDPLPDAGASPAPSRCCRRRSSVAFFAVCDGHGGREAAQFAREHLWGFIKKQKGFTSSEPAKVCAAIRKGFLACHLAMWKKLAEWPKTMTGLPSTSGTTASVVIIRGMKMYVAHVGDSGVVLGIQDDPKDDFVRAVEVTQDHKPELPKERERIEGLGGSVMNKSGVNRVVWKRPRLTHNGPVRRSTVIDQIPFLAVARALGDLWSYDFFSGEFVVSPEPDTSVHTLDPQKHKYIILGSDGLWNMIPPQDAISMCQDQEEKKYLMGEHGQSCAKMLVNRALGRWRQRMLRADNTSAIVICISPEVDNQGNFTNEDELYLNLTDSPSYNSQETCVMTPSPCSTPPVKSLEEDPWPRVNSKDHIPALVRSNAFSENFLEVSAEIARENVQGVVIPSKDPEPLEENCAKALTLRIHDSLNNSLPIGLVPTNSTNTVMDQKNLKMSTPGQMKAQEIERTPPTNFKRTLEESNSGPLMKKHRRNGLSRSSGAQPASLPTTSQRKNSVKLTMRRRLRGQKKIGNPLLHQHRKTVCVCXNASGK

SEQ ID NO: 568 - protein, 105 aa, Homo Sapiens
  misc_feature (96)..(96): Xaa can be any naturally occurring amino acid
MAAARLCLSLLLLSTCVALLLQPLLGAQGAPLEPVYPGDNATPEQMAQYAADLRRYINMLTRPRYGKRHKEDTLAFSEWGSPHAAVPRELSPLDLXCHLLSPTTP

SEQ ID NO: 569 - protein, 285 aa, Homo Sapiens
  misc_feature (272)..(272): Xaa can be any naturally occurring amino acid
MEALPLLAATTPDHGRHRRLLLLPLLLFLLPAGAVQGWETEERPRTREEECHFYAGGQVYPGEASRVSVADHSLHLSKAKISKPAPYWEGTAVIDGEFKELKLTDYRGKYLVFFFYPLDFTFVCPTEIIAFGDRLEEFRSINTEVVACSVDSQFTHLAWINTPRRQGGLGPIRIPLLSDLTHQISKDYGVYLEDSGHTLRGLFIIDDKGILRQITLNDLPVGRSVDETLRLVQAFQYTDKHGEVCPAGWKPGSETIIPDPAGKLKYFDKLNXEILLQVMMLESSQ

SEQ ID NO: 570 - protein, 692 aa, Homo Sapiens
  misc_feature (673)..(673): Xaa can be any naturally occurring amino acid
MADVFPGNDSTASQDVANRFARKGALRQKNVHEVKDHKFIARFFKQPTFCSHCTDFIWGFGKQGFQCQVCCFVVHKRCHEFVTFSCPGADKGPDTDDPRSKHKFKIHTYGSPTFCDHCGSLLYGLIHQGMKCDTCDMNVHKQCVINVPSLCGMDHTEKRGRIYLKAEVADEKLHVTVRDAKNLIPMDPNGLSDPYVKLKLIPDPKNESKQKTKTIRSTLNPQWNESFTFKLKPSDKDRRLSVEIWDWDRTTRNDFMGSLSFGVSELMKMPASGWYKLLNQEEGEYYNVPIPEGDEEGNMELRQKFEKAKLGPAGNKVISPSEDRKQPSNNLDRVKLTDFNFLMVLGKGSFGKVMLADRKGTEELYAIKILKKDVVIQDDDVECTMVEKRVLALLDKPPFLTQLHSCFQTVDRLYFVMEYVNGGDLMYHIQQVGKFKEPQAVFYAAEISIGLFFLHKRGIIYRDLKLDNVMLDSEGHIKIADFGMCKEHMMDGVTTRTFCGTPDYIAPEIIAYQPYGKSVDWWAYGVLLYEMLAGQPPFDGEDEDELFQSIMEHNVSYPKSLSKEAVSICKGLMTKHPAKRLGCGPEGERDVREHAFFRRIDWEKLENREIQPPFKPKVCGKGAENFDKFFTRGQPVLTPPDQLVIANIDQSDFEGFSYVNPQFVHPILQSAVXNSPARTNTSPAPSPPRSGK

SEQ ID NO: 571 - protein, 677 aa, Homo Sapiens
  misc_feature (674)..(674): Xaa can be any naturally occurring amino acid
MADPAAGPPPSEGEESTVRFARKGALRQKNVHEVKNHKFTARFFKQPTFCSHCTDFIWGFGKQGFQCQVCCFVVHKRCHEFVTFSCPGADKGPASDDPRSKHKFKIHTYSSPTFCDHCGSLLYGLIHQGMKCDTCMMNVHKRCVMNVPSLCGTDHTERRGRIYIQAHIDRDVLIVLVRDAKNLVPMDPNGLSDPYVKLKLIPDPKSESKQKTKTIKCSLNPEWNETFRFQLKESDKDRRLSVEIWDWDLTSRNDFMGSLSFGISELQKASVDGWFKLLSQEEGEYFNVPVPPEGSEANEELRQKFERAKISQGTKVPEEKTTNTVSKFDNNGNRDRMKLTDFNFLMVLGKGSFGKVMLSERKGTDELYAVKILKKDVVIQDDDVECTMVEKRVLALPGKPPFLTQLHSCFQTMDRLYFVMEYVNGGDLMYHIQQVGRFKEPHAVFYAAEIAIGLFFLQSKGIIYRDLKLDNVMLDSEGHIKIADFGMCKENIWDGVTTKTFCGTPDYIAPEIIAYQPYGKSVDWWAFGVLLYEMLAGQAPFEGEDEDELFQSIMEHNVAYPKSMSKEAVAICKGLMTKHPGKRLGCGPEGERDIKEHAFFRYIDWEKLERKEIQPPYKPKACGRNAENFDRFFTRHPPVLTPPDQEVIRNIDQSEFEGFSFVNSEFLKPEVKSXVDV

SEQ ID NO: 572 - protein, 683 aa, Homo Sapiens
  misc_feature (672)..(672): Xaa can be any naturally occurring amino acid
MADPAAGPPPSEGEESTVRFARKGALRQKNVHEVKNHKFTARFFKQPTFCSHCTDFIWGFGKQGFQCQVCCFVVHKRCHEFVTFSCPGADKGPASDDPRSKHKFKIHTYSSPTFCDHCGSLLYGLIHQGMKCDTCMMNVHKRCVMNVPSLCGTDHTERRGRIYIQAHIDRDVLIVLVRDAKNLVPMDPNGLSDPYVKLKLIPDPKSESKQKTKTIKCSLNPEWNETFRFQLKESDKDRRLSVEIWDWDLTSRNDFMGSLSFGISELQKASVDGWFKLLSQEEGEYFNVPVPPEGSEANEELRQKFERAKISQGTKVPEEKTTNTVSKFDNNGNRDRMKLTDFNFLMVLGKGSFGKVMLSERKGTDELYAVKILKKDVVIQDDDVECTMVEKRVLALPGKPPFLTQLHSCFQTMDRLYFVMEYVNGGDLMYHIQQVGRFKEPHAVFYAAEIAIGLFFLQSKGIIYRDLKLDNVMLDSEGHIKIADFGMCKENIWDGVTTKTFCGTPDYIAPEIIAYQPYGKSVDWWAFGVLLYEMLAGQAPFEGEDEDELFQSIMEHNVAYPKSMSKEAVAICKGLMTKHPGKRLGCGPEGERDIKEHAFFRYIDWEKLERKEIQPPYKPKARDKRDTSNFDKEFTRQPVELTPTDKLFIMNLDQNEFAGFSYTNPEFVINVXVNANSIVEPGV

SEQ ID NO: 573 - protein, 797 aa, Homo Sapiens
  misc_feature (738)..(738): Xaa can be any naturally occurring amino acid
MVVFNGLLKIKICEAVSLKPTAWSLRHAVGPRPQTFLLDPYIALNVDDSRIGQTATKQKTNSPAWHDEFVTDVCNGRKIELAVFHDAPIGYDDFVANCTIQFEELLQNGSRHFEDWIDLEPEGRVYVIIDLSGSSGEAPKDNEERVFRERMRPRKRQGAVRRRVHQVNGHKFMATYLRQPTYCSHCRDFIWGVIGKQGYQCQVCTCVVHKRCHELIITKCAGLKKQETPDQVGSQRFSVNMPHKFGIHNYKVPTFCDHCGSLLWGLLRQGLQCKVCKMNVHRRCETNVAPNCGVDARGIAKVLADLGVTPDKITNSGQRRKKLIAGAESPQPASGSSPSEEDRSKSAPTSPCDQEIKELENNIRKALSFDNRGEEHRAASSPDGQLMSPGENGEVRQGQAKRLGLDEFNFIKVLGKGSFGKVMLAELKGKDEVYAVKVLKKDVILQDDDVDCTMTEKRILALARKHPYLTQLYCCFQTKDRLFFVMEYVNGGDLMFQIQRSRKFDEPRSRFYAAEVTSALMFLHQHGVIYRDLKLDNILLDAEGHCKLADFGMCKEGILNGVTTTTFCGTPDYIAPEILQELEYGPSVDWWALGVLMYEMMAGQPPFEADNEDDLFESILHDDVLYPVWLSKEAVSILKAFMTKNPHKRLGCVASQNGEDAIKQHPFFKEIDWVLLEQKKIKPPFKPRIKTKRDVNNFDQDFTREEPVLTLVDEAIVKQINQEEFKGFSYFGEDLMPXEPTAVGLCRCCKKGCREDSCVGDTQQVLNYFSSSEPQSHVHCLFIAFPCPRPPPPPPTW

SEQ ID NO: 574 - protein, 744 aa, Homo Sapiens
  misc_feature (707)..(707): Xaa can be any naturally occurring amino acid
MSPFLRIGLSNFDCGSCQSCQGEAVNPYCAVLVKEYVESENGQMYIQKKPTMYPPWDSTFDAHINKGRVMQIIVKGKNVDLISETTVELYSLAERCRKNNGKTEIWLELKPQGRMLMNARYFLEMSDTKDMNEFETEGFFALHQRRGAIKQAKVHHVKCHEFTATFFPQPTFCSVCHEFVWGLNKQGYQCRQCNAAIHKKCIDKVIAKCTGSAINSRETMFHKERFKIDMPHRFKVYNYKSPTFCEHCGTLLWGLARQGLKCDACGMNVHHRCQTKVANLCGINQKLMAEALAMIESTQQARCLRDTEQIFREGPVEIGLPCSIKNEARPPCLPTPGKREPQGISWESPLDEVDKMCHLPEPELNKERPSLQIKLKIEDFILHKMLGKGSFGKVFLAEFKKTNQFFAIKALKKDVVLMDDDVECTMVEKRVLSLAWEHPFLTHMFCTFQTKENLFFVMEYLNGGDLMYHIQSCHKFDLSRATFYAAEIILGLQFLHSKGIVYRDLKLDNILLDKDGHIKIADFGMCKENMLGDAKTNTFCGTPDYIAPEILLGQKYNHSVDWWSFGVLLYEMLIGQSPFHGQDEEELFHSIRMDNPFYPRWLEKEAKDLLVKLFVREPEKRLGVRGDIRQHPLFREINWEELERKEIDPPFRPKVKSPFDCSNFDKEFLNEKPRLSFADRALINSMDQNMFRNFSFMNPGMERLISXILPLQRQERICLLPGNWFKRHCLGSFFNLEKERNTQQ

SEQ ID NO: 575 - protein, 4142 aa, Homo Sapiens
  misc_feature (4129)..(4129): Xaa can be any naturally occurring amino acid
MAGSGAGVRCSLLRLQETLSAADRCGAALAGHQLIRGLGQECVLSSSPAVLALQTSLVFSRDFGLLVFVRKSLNSIEFRECREEILKFLCIFLEKMGQKIAPYSVEIKNTCTSVYTKDRAAKCKIPALDLLIKLLQTFRSSRLMDEFKIGELFSKFYGELALKKKIPDTVLEKVYELLGLLGEVHPSEMINNAENLFRAFLGELKTQMTSAVREPKLPVLAGCLKGLSSLLCNFTKSMEEDPQTSREIFNFVLKAIRPQIDLKRYAVPSAGLRLFALHASQFSTCLLDNYVSLFEVLLKWCAHTNVELKKAALSALESFLKQVSNMVAKNAEMHKNKLQYFMEQFYGIIRNVDSNNKELSIAIRGYGLFAGPCKVINAKDVDFMYVELIQRCKQMFLTQTDTGDDRVYQMPSFLQSVASVLLYLDTVPEVYTPVLEHLVVMQIDSFPQYSPKMQLVCCRAIVKVFLALAAKGPVLRNCISTVVHQGLIRICSKPVVLPKGPESESEDHRASGEVRTGKWKVPTYKDYVDLFRHLLSSDQMMDSILADEAFFSVNSSSESLNHLLYDEFVKSVLKIVEKLDLTLEIQTVGEQENGDEAPGVWMIPTSDPAANLHPAKPKDFSAFINLVEFCREILPEKQAEFFEPWVYSFSYELILQSTRLPLISGFYKLLSITVRNAKKIKYFEGVSPKSLKHSPEDPEKYSCFALFVKFGKEVAVKMKQYKDELLASCLTFLLSLPHNIIELDVRAYVPALQMAFKLGLSYTPLAEVGLNALEEWSIYIDRHVMQPYYKDILPCLDGYLKTSALSDETKNNWEVSALSRAAQKGFNKVVLKHLKKTKNLSSNEAISLEEIRIRVVQMLGSLGGQINKNLLTVTSSDEMMKSYVAWDREKRLSFAVPFREMKPVIFLDVFLPRVTELALTASDRQTKVAACELLHSMVMFMLGKATQMPEGGQGAPPMYQLYKRTFPVLLRLACDVDQVTRQLYEPLVMQLIHWFTNNKKFESQDTVALLEAILDGIVDPVDSTLRDFCGRCIREFLKWSIKQITPQQQEKSPVNTKSLFKRLYSLALHPNAFKRLGASLAFNNIYREFREEESLVEQFVFEALVIYMESLALAHADEKSLGTIQQCCDAIDHLCRIIEKKHVSLNKAKKRRLPRGFPPSASLCLLDLVKWLLAHCGRPQTECRHKSIELFYKFVPLLPGNRSPNLWLKDVLKEEGVSFLINTFEGGGCGQPSGILAQPTLLYLRGPFSLQATLCWLDLLLAALECYNTFIGERTVGALQVLGTEAQSSLLKAVAFFLESIAMHDIIAAEKCFGTGAAGNRTSPQEGERYNYSKCTVVVRIMEFTTTLLNTSPEGWKLLKKDLCNTHLMRVLVQTLCEPASIGFNIGDVQVMAHLPDVCVNLMKALKMSPYKDILETHLREKITAQSIEELCAVNLYGPDAQVDRSRLAAVVSACKQLHRAGLLHNILPSQSTDLHHSVGTELLSLVYKGIAPGDERQCLPSLDLSCKQLASGLLELAFAFGGLCERLVSLLLNPAVLSTASLGSSQGSVIHFSHGEYFYSLFSETINTELLKNLDLAVLELMQSSVDNTKMVSAVLNGMLDQSFRERANQKHQGLKLATTILQHWKKCDSWWAKDSPLETKMAVLALLAKILQIDSSVSFNTSHGSFPEVFTTYISLLADTKLDLHLKGQAVTLLPFFTSLTGGSLEELRRVLEQLIVAHFPMQSREFPPGTPRFNNYVDCMKKFLDALELSQSPMLLELMTEVLCREQQHVMEELFQSSFRRIARRGSCVTQVGLLESVYEMFRKDDPRLSFTRQSFVDRSLLTLLWHCSLDALREFFSTIVVDAIDVLKSRFTKLNESTFDTQITKKMGYYKILDVMYSRLPKDDVHAKESKINQVFHGSCITEGNELTKTLIKLCYDAFTENMAGENQLLERRRLYHCAAYNCAISVICCVFNELKFYQGFLFSEKPEKNLLIFENLIDLKRRYNFPVEVEVPMERKKKYIEIRKEAREAANGDSDGPSYMSSLSYLADSTLSEEMSQFDFSTGVQSYSYSSQDPRPATGRFRRREQRDPTVHDDVLELEMDELNRHECMAPLTALVKHMHRSLGPPQGEEDSVPRDLPSWMKFLHGKLGNPIVPLNIRLFLAKLVINTEEVFRPYAKHWLSPLLQLAASENNGGEGIHYMVVEIVATILSWTGLATPTGVPKDEVLANRLLNFLMKHVFHPKRAVFRHNLEIIKTLVECWKDCLSIPYRLIFEKFSGKDPNSKDNSVGIQLLGIVMANDLPPYDPQCGIQSSEYFQALVNNMSFVRYKEVYAAAAEVLGLILRYVMERKNILEESLCELVAKQLKQHQNTMEDKFIVCLNKVTKSFPPLADRFMNAVFFLLPKFHGVLKTLCLEVVLCRVEGMTELYFQLKSKDFVQVMRHRDDERQKVCLDIIYKMMPKLKPVELRELLNPVVEFVSHPSTTCREQMYNILMWIHDNYRDPESETDNDSQEIFKLAKDVLIQGLIDENPGLQLIIRNFWSHETRLPSNTLDRLLALNSLYSPKIEVHFLSLATNFLLEMTSMSPDYPNPMFEHPLSECEFQEYTIDSDWRFRSTVLTPMFVETQASQGTLQTRTQEGSLSARWPVAGQIRATQQQHDFTLTQTADGRSSFDWLTGSSTDPLVDHTSPSSDSLLFAHKRSERLQRAPLKSVGPDFGKKRLGLPGDEVDNKVKGAAGRTDLLRLRRRFMRDQEKLSLMYARKGVAEQKREKEIKSELKMKQDAQVVLYRSYRHGDLPDIQIKHSSLITPLQAVAQRDPIIAKQLFSSLFSGILKEMDKFKTLSEKNNITQKLLQDFNRFLNTTFSFFPPFVSCIQDISCQHAALLSLDPAAVSAGCLASLQQPVGIRLLEEALLRLLPAELPAKRVRGKARLPPDVLRWVELAKLYRSIGEYDVLRGIFTSEIGTKQITQSALLAEARSDYSEAAKQYDEALNKQDWVDGEPTEAEKDFWELASLDCYNHLAEWKSLEYCSTASIDSENPPDLNKIWSEPFYQETYLPYMIRSKLKLLLQGEADQSLLTFIDKAMHGELQKAILELHYSQELSLLYLLQDDVDRAKYYIQNGIQSFMQNYSSIDVLLHQSRLTKLQSVQALTEIQEFISFISKQGNLSSQVPLKRLLNTWTNRYPDAKMDPMNIWDDIITNRCFFLSKIEEKLTPLPEDNSMNVDQDGDPSDRMEVQEQEEDISSLIRSCKFSMKMKMIDSARKQNNFSLAMKLLKELHKESKTRDDWLVSWVQSYCRLSHCRSRSQGCSEQVLTVLKTVSLLDENNVSSYLSKNILAFRDQNILLGTTYRIIANALSSEPACLAEIEEDKARRILELSGSSSEDSEKVIAGLYQRAFQHLSEAVQAAEEEAQPPSWSCGPAAGVIDAYMTLADFCDQQLRKEEENASVIDSAELQAYPALVVEKMLKALKLNSNEARLKFPRLLQIIERYPEETLSLMTKEISSVPCWQFISWISHMVALLDKDQAVAVQHSVEEITDNYPQAIVYPFIISSESYSFKDTSTGHKNKEFVARIKSKLDQGGVIQDFINALDQLSNPELLFKDWSNDVRAELAKTPVNKKNIEKMYERMYAALGDPKAPGLGAFRRKFIQTFGKEFDKHFGKGGSKLLRMKLSDFNDITNMLLLKMNKDSKPPGNLKECSPWMSDFKVEFLRNELEIPGQYDGRGKPLPEYHVRIAGFDERVTVMASLRRPKRIIIRGHDEREHPFLVKGGEDLRQDQRVEQLFQVMNGILAQDSACSQRALQLRTYSVVPMTSRLGLIEWLENTVTLKDLLLNTMSQEEKAAYLSDPRAPPCEYKDWLTKMSGKHDVGAYMLMYKGANRTETVTSFRKRESKVPADLLKRAFVRMSTSPEAFLALRSHFASSHALICISHWILGIGDRHLNNFMVAMETGGVIGIDFGHAFGSATQFLPVPELMPFRLTRQFINLMLPMKETGLMYSIMVHALRAFRSDPGLLTNTMDVFVKEPSFDWKNFEQKMLKKGGSWIQEINVAEKNWYPRQKICYAKRKLAGANPAVITCDELLLGHEKAPAFRDYVAVARGSKDHNIRAQEPESGLSEETQVKCLMDQATDPNILGRTWEGWEPWMXGLWESADRKHYIV

SEQ ID NO: 576 - protein, 157 aa, Homo Sapiens
  misc_feature (124)..(124): Xaa can be any naturally occurring amino acid
MKAVLLALLMAGLALQPGTALLCYSCKAQVSNEDCLQVENCTQLGEQCWTARIRAVGLLTVISKGCSLNCVDDSQDYYVGKKNITCCDTDLCNASGAHALQPAAAILALLPALGLLLWGPGQLXALGGPAAAHTGCGAPGLCATPHTPGPVGACPGS

SEQ ID NO: 577 - protein, 615 aa, Homo Sapiens
  misc_feature (605)..(605): Xaa can be any naturally occurring amino acid
MLARALLLCAVLALSHTANPCCSHPCQNRGVCMSVGFDQYKCDCTRTGFYGENCSTPEFLTRIKLFLKPTPNTVHYILTHFKGFWNVVNNIPFLRNAIMSYVLTSRSHLIDSPPTYNADYGYKSWEAFSNLSYYTRALPPVPDDCPTPLGVKGKKQLPDSNEIVEKLLLRRKFIPDPQGSNMMFAFFAQHFTHQFFKTDHKRGPAFTNGLGHGVDLNHIYGETLARQRKLRLFKDGKMKYQIIDGEMYPPTVKDTQAEMIYPPQVPEHLRFAVGQEVFGLVPGLMMYATIWLREHNRVCDVLKQEHPEWGDEQLFQTSRLILIGETIKIVIEDYVQHLSGYHFKLKFDPELLFNKQFQYQNRIAAEFNTLYHWHPLLPDTFQIHDQKYNYQQFIYNNSILLEHGITQFVESFTRQIAGRVAGGRNVPPAVQKVSQASIDQSRQMKYQSFNEYRKRFMLKPYESFEELTGEKEMSAELEALYGDIDAVELYPALLVEKPRPDAIFGETMVEVGAPFSLKGLMGNVICSPAYWKPSTFGGEVGFQIINTASIQSLICNNVKGCPFTSFSVPDPELIKTVTINASSSRSGLDDINPTVLLKERSTELXKSNDHIYLFI

SEQ ID NO: 578 - protein, 1077 aa, Homo Sapiens
  misc_feature (1053)..(1053): Xaa can be any naturally occurring amino acid
MAAAYLDPNLNHTPNSSTKTHLGTGMERSPGAMERVLKVFHYFESNSEPTTWASIIRHGDATDVRGIIQKIVDSHKVKHVACYGFRLSHLRSEEVHWLHVDMGVSSVREKYELAHPPEEWKYELRIRYLPKGFLNQFTEDKPTLNFFYQQVKSDYMLEIADQVDQEIALKLGCLEIRRSYWEMRGNALEKKSNYEVLEKDVGLKRFFPKSLLDSVKAKTLRKLIQQTFRQFANLNREESILKFFEILSPVYRFDKECFKCALGSSWIISVELAIGPEEGISYLTDKGCNPTHLADFTQVQTIQYSNSEDKDRKGMLQLKIAGAPEPLTVTAPSLTIAENMADLIDGYCRLVNGTSQSFIIRPQKEGERALPSIPKLANSEKQGMRTHAVSVSETDDYAEIIDEEDTYTMPSTRDYEIQRERIELGRCIGEGQFGDVHQGIYMSPENPALAVAIKTCKNCTSDSVREKFLQEALTMRQFDHPHIVKLIGVITENPVWIIMELCTLGELRSFLQVRKYSLDLASLILYAYQLSTALAYLESKRFVHRDIAARNVLVSSNDCVKLGDFGLSRYMEDSTYYKASKGKLPIKWMAPESINFRRFTSASDVWMFGVCMWEILMHGVKPFQGVKNNDVIGRIENGERLPMPPNCPPTLYSLMTKCWAYDPSRRPRFTELKAQLSTILEEEKAQQEERMRMESRRQATVSWDSGGSDEAPPKPSRPGYPSPRSSEGFYPSPQHMVQTNHYQVSGYPGSHGITAMAGSIYPGQASLLDQTDSWNHRPQEIAMWQPNVEDSTVLDLRGIGQVLPTHLMEERLIRQQQEMEEDQRWLEKEERFLKPDVRLSRGSIDREDGSLQGPIGNQHIYQPVGKPDPAAPPKKPPRPGAPGHLGSLASLSSPADSYNEGVKLQPQEISPPPTANLDRSNDKVYENVTGLVKAVIEMSSKIQPAPPEEYVPMVKEVGLALRTLLATVDETIPLLPASTHREIEMAQKLLNSDLGELINKMKLAQQYVMTSLQQEYKKQMLTAAHALAVDAKNLLDVIDQARLKMLGQTRPHXASPRSTSCYPLLKMFSSLPPAARN

SEQ ID NO: 579 - protein, 202 aa, Homo Sapiens
  misc_feature (169)..(169): Xaa can be any naturally occurring amino acid
MQAQQYQQQRRKFAAAFLAFIFILAAVDTAEAGKKEKPEKKVKKSDCGEWQWSVCVPTSGDCGLGTREGTRTGAECKQTMKTQRCKIPCNWKKQFGAECKYQFQAWGECDLNTALKTRTGSLKRALHNAECQKTVTISKPCGKLTKPKPQAESKKKKKEGKKQEKMLDXKMSPVEHKKDISKQDQLTIAFICTVGFVFKNYL

SEQ ID NO: 580 - protein, 1213 aa, Homo Sapiens
  misc_feature (1189)..(1189): Xaa can be any naturally occurring amino acid
MGHLPTGIHGARRLLPLLWLFVLFKNATAFHVTVQDDNNIVVSLEASDVISPASVYVVKITGESKNYFFEFEEFNSTLPPPVIFKASYHGLYYIITLVVVNGNVVTKPSRSITVLTKPLPVTSVSIYDYKPSPETGVLFEIHYPEKYNVFTRVNISYWEGKDFRTMLYKDFFKGKTVFNHWLPGMCYSNITFQLVSEATFNKSTLVEYSGVSHEPKQHRTAPYPPQNISVRIVNLNKNNWEEQSGNFPEESFMRSQDTIGKEKLFHFTEETPEIPSGNISSGWPDFNSSDYETTSQPYWWDSASAAPESEDEFVSVLPMEYENNSTLSETEKSTSGSFSFFPVQMILTWLPPKPPTAFDGFHIHIEREENFTEYLMVDEEAHEFVAELKEPGKYKLSVTTFSSSGSCETRKSQSAKSLSFYISPSGEWIEELTEKPQHVSVHVLSSTTALMSWTSSQENYNSTIVSVVSLTCQKQKESQRLEKQYCTQVNSSKPIIENLVPGAQYQVVIYLRKGPLIGPPSDPVTFAIVPTGIKDLMLYPLGPTAVVLSWTRPYLGVFRKYVVEMFYFNPATMTSEWTTYYEIAATVSLTASVRIANLLPAWYYNFRVTMVTWGDPELSCCDSSTISFITAPVAPEITSVEYFNSLLYISWTYGDDTTDLSHSRMLHWMVVAEGKKKIKKSVTRNVMTAILSLPPGDIYNLSVTACTERGSNTSMLRLVKLEPAPPKSLFAVNKTQTSVTLLWVEEGVADFFEVFCQQVGSSQKTKLQEPVAVSSHVVTISSLLPATAYNCSVTSFSHDSPSVPTFIAVSTMVTEMNPNVVVISVLAILSTLLIGLLLVTLIILRKKHLQMARECGAGTFVNFASLERDGKLPYNWSKNGLKKRKLTNPVQLDDFDAYIKDMAKDSDYKFSLQFEELKLIGLDIPHFAADLPLNRCKNRYTNILPYDFSRVRLVSMNEEEGADYINANYIPGYNSPQEYIATQGPLPETRNDFWKMVLQQKSQIIVMLTQCNEKRRVKCDHYWPFTEEPIAYGDITVEMISEEEQDDWACRHFRINYADEMQDVMHFNYTAWPDHGVPTANAAESILQFVHMVRQQATKSKGPMIIHCSAGVGRTGTFIALDRLLQHIRDHEFVDILGLVSEMRSYRMSMVQTEEQYIFIHQCVQLMWMKKKQQFCISDVIYENVSKSXFRIRSREDMMCAHPPLLPDCFSGP

SEQ ID NO: 581 - protein, 763 aa, Homo Sapiens
  misc_feature (757)..(757): Xaa can be any naturally occurring amino acid
MASAPPASPPGSEPPGPDPEPGGPDGPGAAQLAPGPAELRLGAPVGGPDPQSPGLDEPAPGAAADGGARWSAGPAPGLEGGPRDPGPSAPPPRSGPRGQLASPDAPGPGPRSEAPLPELDPLFSWTEEPEECGPASCPESAPFRLQGSSSSHRARGEVDVFSPFPAPTAGELALEQGPGSPPQPSDLSQTHPLPSEPVGSQEDGPRLRAVFDALDGDGDGFVRIEDFIQFATVYGAEQVKDLTKYLDPSGLGVISFEDFYQGITAIRNGDPDGQCYGGVASAQDEEPLACPDEFDDFVTYEANEVTDSAYMGSESTYSECETFTDEDTSTLVHPELQPEGDADSAGGSAVPSECLDAMEEPDHGALLLLPGRPHPHGQSVITVIGGEEHFEDYGEGSEAELSPETLCNGQLGCSDPAFLTPSPTKRLSSKKVARYLHQSGALTMEALEDPSPELMEGPEEDIADKVVFLERRVLELEKDTAATGEQHSRLRQENLQLVHRANALEEQLKEQELRACEMVLEETRRQKELLCKMEREKSIEIENLQTRLQQLDEENSELRSCTPCLKANIERLEEEKQKLLDEIESLTLRLSEEQENKRRMGDRLSHERHQFQRDKEATQELIEDLRKQLEHLQLLKLEAEQRRGRSSSMGLQEYHSRARESELEQEVRRLKQDNRNLKEQNEELNGQIITLSIQGAKSLFSTAFSESLAAEISSVSRDELMEAIQKQEEINFRLQDYIDRIIVAIMETNPSILEVKXRQEGPA

SEQ ID NO: 582 - protein, 226 aa, Homo Sapiens
  misc_feature (207)..(207): Xaa can be any naturally occurring amino acid
MDEDVLTTLKILIIGESGVGKSSLLLRFTDDTFDPELAATIGVDFKVKTISVDGNKAKLAIWDTAGQERFRTLTPSYYRGAQGVILVYDVTRRDTFVKLDNWLNELETYCTRNDIVNMLVGNKIDKENREVDRNEGLKFARKHSMLFIEASAKTCDGVQCAFEELVEKIIQTPGLWESENQNKGVKLSHREEGQGGGACGGYCSVLXTLGNSISCIFDQIVTSFCI

SEQ ID NO: 583 - protein, 257 aa, Homo Sapiens
  misc_feature (214)..(214): Xaa can be any naturally occurring amino acid
MGNGTEEDYNFVFKVVLIGESGVGKTNLLSRFTRNEFSHDSRTTIGVEFSTRTVMLGTAAVKAQIWDTAGLERYRAITSAYYRGAVGALLVFDLTKHQTYAVVERWLKELYDHAEATIVVMLVGNKSDLSQAREVPTEEARMFAENNGLLFLETSALDSTNVELAFETVLKEIFAKVSKQRQNSIRTNAITLGSAQAGQEPGPGEKRACCISLXPWPAPPAPTGFLVPLVPTSAPGPFLALWFQISDCSLFTAPSGS

SEQ ID NO: 584 - protein, 242 aa, Homo Sapiens
  misc_feature (193)..(193): Xaa can be any naturally occurring amino acid
MQAIKCVVVGDGAVGKTCLLISYTTNAFPGEYIPTVFDNYSANVMVDGKPVNLGLWDTAGQEDYDRLRPLSYPQTDVFLICFSLVSPASFENVRAKWYPEVRHHCPNTPIILVGTKLDLRDDKDTIEKLKEKKLTPITYPQGLAMAKEIGAVKYLECSALTQRGLKTVFDEAIRAVLCPPPVKKRKRKCLLLXMSQPLVLGPVPWNLCTLCSKKNKKKKQKKKTTVEPSHSMPTFCYRLIFP

SEQ ID NO: 585 - protein, 198 aa, Homo Sapiens
  misc_feature (149)..(149): Xaa can be any naturally occurring amino acid
MVDGKPVNLGLWDTAGQEDYDRLRPLSYPQTDVFLICFSLVSPASFENVRAKWYPEVRHHCPNTPIILVGTKLDLRDDKDTIEKLKEKKLTPITYPQGLAMAKEIGAVKYLECSALTQRGLKTVFDEAIRAVLCPPPVKKRKRKCLLLXMSQPLVLGPVPWNLCTLCSKKNKKKKQKKKTTVEPSHSMPTFCYRLIFP

SEQ ID NO: 586 - protein, 383 aa, Homo Sapiens
  misc_feature (364)..(364): Xaa can be any naturally occurring amino acid
MAVTITLKTLQQQTFKIRMEPDETVKVLKEKIEAEKGRDAFPVAGQKLIYAGKILSDDVPIRDYRIDEKNFVVVMVTKTKAGQGTSAPPEASPTAAPESSTSFPPAPTSGMSHPPPAAREDKSPSEESAPTTSPESVSGSVPSSGSSGREEDAASTLVTGSEYETMLTEIMSMGYERERVVAALRASYNNPHRAVEYLLTGIPGSPEPEHGSVQESQVSEQPATEAAGENPLEFLRDQPQFQNMRQVIQQNPALLPALLQQLGQENPQLLQQISRHQEQFIQMLNEPPGELADISDVEGEVGAIGEEAPQMNYIQVTPQEKEAIERLKALGFPESLVIQAYFACEKNENLAANFLLSQNFDDEXCQEARPPKPPPYPYSMKVL

SEQ ID NO: 587 - protein, 471 aa, Homo Sapiens
  misc_feature (410)..(410): Xaa can be any naturally occurring amino acid
MQVTLKTLQQQTFKIDIDPEETVKALKEKIESEKGKDAFPVAGQKLIYAGKILNDDTALKEYKIDEKNFVVVMVTKPKAVSTPAPATTQQSAPASTTAVTSSTTTTVAQAPTPVPALAPTSTPASITPASATASSEPAPASAAKQEKPAEKPAETPVATSPTATDSTSGDSSRSNLFEDATSALVTGQSYENMVTEIMSMGYEREQVIAALRASFNNPDRAVEYLLMGIPGDRESQAVVDPPQAASTGAPQSSAVAAAAATTTATTTTTSSGGHPLEFLRNQPQFQQMRQIIQQNPSLLPALLQQIGRENPQLLQQISQHQEHFIQMLNEPVQEAGGQGGGGGGGSGGIAEAGSGHMNYIQVTPQEKEAIERLKALGFPEGLVIQAYFACEKNENLAANFLLQQNFDEDXKGLFYISHFTPVHYTNLFTGLSGMTWAHIHNTWYKVVDCWGWGGRDLGYRAGINTVHVCFN

SEQ ID NO: 588 - protein, 347 aa, Homo Sapiens
  misc_feature (340)..(340): Xaa can be any naturally occurring amino acid
MAMQMQLEANADTSVEEESFGPQPISRLEQCGINANDVKKLEEAGFHTVEAVAYAPKKELINIKGISEAKADKILAEAAKLVPMGFTTATEFHQRRSEIIQITTGSKELDKLLQGGIETGSITEMFGEFRTGKTQICHTLAVTCQLPIDRGGGEGKAMYIDTEGTFRPERLLAVAERYGLSGSDVLDNVAYARAFNTDHQTQLLYQASAMMVESRYALLIVDSATALYRTDYSGRGELSARQMHLARFLRMLLRLADEFGVAVVITNQVVAQVDGAAMFAADPKKPIGGNIIAHASTTRLYLRKGRGETRICKIYDSPCLPEAEAMFAINADGVGDAKDXIIGFFLC

SEQ ID NO: 589 - protein, 460 aa, Homo Sapiens
  misc_feature (419)..(419): Xaa can be any naturally occurring amino acid
MSGTEEAILGGRDSHPAAGGGSVLCFGQCQYTAEEYQAIQKALRQRLGPEYISSRMAGGGQKVCYIEGHRVINLANEMFGYNGWAHSITQQNVDFVDLNNGKFYVGVCAFVRVQLKDGSYHEDVGYGVSEGLKSKALSLEKARKEAVTDGLKRALRSFGNALGNCILDKDYLRSLNKLPRQLPLEVDLTKAKRQDLEPSVEEARYNSCRPNMALGHPQLQQVTSPSRPSHAVIPADQDCSSRSLSSSAVESEATHQRKLRQKQLQQQFRERMEKQQVRVSTPSAEKSEAAPPAPPVTHSTPVTVSEPLLEKDFLAGVTQELIKTLEDNSEKWAVTPDAGDGVVKPSSRADPAQTSDTLALNNQMVTQNRTPHSVCHQKPQAKSGSWDLQTYSADQRTTGNWESHRKSQDMKKRKYDPSXLRLRPHNWTLSQRDFGKLLFGHEIVHRCWRMNVIAIYLASF

SEQ ID NO: 590 - protein, 690 aa, Homo Sapiens
  misc_feature (649)..(649): Xaa can be any naturally occurring amino acid
MEHIQGAWKTISNGFGFKDAVFDGSSCISPTIVQQFGYQRRASDDGKLTDPSKTSNTIRVFLPNKQRTVVNVRNGMSLHDCLMKALKVRGLQPECCAVFRLLHEHKGKKARLDWNTDAASLIGEELQVDFLDHVPLTTHNFARKTFLKLAFCDICQKFLLNGFRCQTCGYKFHEHCSTKVPTMCVDWSNIRQLLLFPNSTIGDSGVPALPSLTMRRMRESVSRMPVSSQHRYSTPHAFTFNTSSPSSEGSLSQRQRSTSTPNVHMVSTTLPVDSRMIEDAIRSHSESASPSALSSSPNNLSPTGWSQPKTPVPAQRERAPVSGTQEKNKIRPRGQRDSSYYWEIEASEVMLSTRIGSGSFGTVYKGKWHGDVAVKILKVVDPTPEQFQAFRNEVAVLRKTRHVNILLFMGYMTKDNLAIVTQWCEGSSLYKHLHVQETKFQMFQLIDIARQTAQGMDYLHAKNIIHRDMKSNNIFLHEGLTVKIGDFGLATVKSRWSGSQQVEQPTGSVLWMAPEVIRMQDNNPFSFQSDVYSYGIVLYELMTGELPYSHINNRDQIIFMVGRGYASPDLSKLYKNCPKAMKRLVADCVKKVKEERPLFPQILSSIELLQHSLPKINRSASEPSLHRAAHTEDINACTLTTSPRLPVFXLTLHLSSGCQGRRRSQQAPLFCSLSPEAEHMFSEKLLLRTF

SEQ ID NO: 591 - protein, 486 aa, Homo Sapiens
  misc_feature (463)..(463): Xaa can be any naturally occurring amino acid
MASNSSSCPTPGGGHLNGYPVPPYAFFFPPMLGGLSPPGALTTLQHQLPVSGYSTPSPATIETQSSSSEEIVPSPPSPPPLPRIYKPCFVCQDKSSGYHYGVSACEGCKGFFRRSIQKNMVYTCHRDKNCIINKVTRNRCQYCRLQKCFEVGMSKESVRNDRNKKKKEVPKPECSESYTLTPEVGELIEKVRKAHQETFPALCQLGKYTTNNSSEQRVSLDIDLWDKFSELSTKCIIKTVEFAKQLPGFTTLTIADQITLLKAACLDILILRICTRYTPEQDTMTFSDGLTLNRTQMHNAGFGPLTDLVFAFANQLLPLEMDDAETGLLSAICLICGDRQDLEQPDRVDMLQEPLLEALKVYVRKRRPSRPHMFPKMLMKITDLRSISAKGAERVITLKMEIPGSMPPLIQEMLENSEGLDTLSGQPGGGGRDGGGLAPPPGSCSPSLSPSSNRSSPATHSPXPPTPHGHSPRPPPRLFSAFLPTM

SEQ ID NO: 592 - protein, 481 aa, Homo Sapiens
  misc_feature (458)..(458): Xaa can be any naturally occurring amino acid
MYESVEVGGPTPNPFLVVDFYNQNRACLLPEKGLPAPGPYSTPLRTPLWNGSNHSIETQSSSSEEIVPSPPSPPPLPRIYKPCFVCQDKSSGYHYGVSACEGCKGFFRRSIQKNMVYTCHRDKNCIINKVTRNRCQYCRLQKCFEVGMSKESVRNDRNKKKKEVPKPECSESYTLTPEVGELIEKVRKAHQETFPALCQLGKYTTNNSSEQRVSLDIDLWDKFSELSTKCIIKTVEFAKQLPGFTTLTIADQITLLKAACLDILILRICTRYTPEQDTMTFSDGLTLNRTQMHNAGFGPLTDLVFAFANQLLPLEMDDAETGLLSAICLICGDRQDLEQPDRVDMLQEPLLEALKVYVRKRRPSRPHMFPKMLMKITDLRSISAKGAERVITLKMEIPGSMPPLIQEMLENSEGLDTLSGQPGGGGRDGGGLAPPPGSCSPSLSPSSNRSSPATHSPXPPTPHGHSPRPPPRLFSAFLPTM

SEQ ID NO: 593 - protein, 452 aa, Homo Sapiens
  misc_feature (449)..(449): Xaa can be any naturally occurring amino acid
MFDCMDVLSVSPGQILDFYTASPSSCMLQEKALKACFSGLTQTEWQHRHTAQSIETQSTSSEELVPSPPSPLPPPRVYKPCFVCQDKSSGYHYGVSACEGCKGFFRRSIQKNMIYTCHRDKNCVINKVTRNRCQYCRLQKCFEVGMSKESVRNDRNKKKKETSKQECTESYEMTAELDDLTEKIRKAHQETFPSLCQLGKYTTNSSADHRVRLDLGLWDKFSELATKCIIKIVEFAKRLPGFTGLTIADQITLLKAACLDILILRICTRYTPEQDTMTFSDGLTLNRTQMHNAGFGPLTDLVFTFANQLLPLEMDDTETGLLSAICLICGDRQDLEEPTKVDKLQEPLLEALKIYIRKRRPSKPHMFPKILMKITDLRSISAKGAERVITLKMEIPGSMPPLIQEMLENSEGHEPLTPSSSGNTAEHSPSISPSSVENSGVSQSPLVQXDIF

SEQ ID NO: 594 - protein, 340 aa, Homo Sapiens
  misc_feature (337)..(337): Xaa can be any naturally occurring amino acid
MIYTCHRDKNCVINKVTRNRCQYCRLQKCFEVGMSKESVRNDRNKKKKETSKQECTESYEMTAELDDLTEKIRKAHQETFPSLCQLGKYTTNSSADHRVRLDLGLWDKFSELATKCIIKIVEFAKRLPGFTGLTIADQITLLKAACLDILILRICTRYTPEQDTMTFSDGLTLNRTQMHNAGFGPLTDLVFTFANQLLPLEMDDTETGLLSAICLICGDRQDLEEPTKVDKLQEPLLEALKIYIRKRRPSKPHMFPKILMKITDLRSISAKGAERVITLKMEIPGSMPPLIQEMLENSEGHEPLTPSSSGNTAEHSPSISPSSVENSGVSQSPLVQXDIF

SEQ ID NO: 595 - protein, 472 aa, Homo Sapiens
  misc_feature (455)..(455): Xaa can be any naturally occurring amino acid
MATNKERLFAAGALGPGSGYPGAGFPFAFPGALRGSPPFEMLSPSFRGLGQPDLPKEMASLSVETQSTSSEEMVPSSPSPPPPPRVYKPCFVCNDKSSGYHYGVSSCEGCKGFFRRSIQKNMVYTCHRDKNCIINKVTRNRCQYCRLQKCFEVGMSKEAVRNDRNKKKKEVKEEGSPDSYELSPQLEELITKVSKAHQETFPSLCQLGKYTTNSSADHRVQLDLGLWDKFSELATKCIIKIVEFAKRLPGFTGLSIADQITLLKAACLDILMLRICTRYTPEQDTMTFSDGLTLNRTQMHNAGFGPLTDLVFAFAGQLLPLEMDDTETGLLSAICLICGDRMDLEEPEKVDKLQEPLLEALRLYARRRRPSQPYMFPRMLMKITDLRGISTKGAERAITLKMEIPGPMPPLIREMLENPEMFEDDSSQPGPHPNASSEDEVPGGQGKGGLKSPAXPGPLTSPLWGLGLQAAD

SEQ ID NO: 596 - protein, 901 aa, Homo Sapiens
  misc_feature (871)..(871): Xaa can be any naturally occurring amino acid
MKGWYHGKLDRTIAEERLRQAGKSGSYLIRESDRRPGSFVLSFLSQMNVVNHFRIIAMCGDYYIGGRRFSSLSDLIGYYSHVSCLLKGEKLLYPVAPPEPVEDRRRVRAILPYTKVPDTDEISFLKGDMFIVHNELEDGWMWVTNLRTDEQGLIVEDLVEEVGREEDPHEGKIWFHGKISKQEAYNLLMTVGQVCSFLVRPSDNTPGDYSLYFRTNENIQRFKICPTPNNQFMMGGRYYNSIGDIIDHYRKEQIVEGYYLKEPVPMQDQEQVLNDTVDGKEIYNTIRRKTKDAFYKNIVKKGYLLKKGKGKRWKNLYFILEGSDAQLIYFESEKRATKPKGLIDLSVCSVYVVHDSLFGRPNCFQIVVQHFSEEHYIFYFAGETPEQAEDWMKGLQAFCNLRKSSPGTSNKRLRQVSSLVLHIEEAHKLPVKHFTNPYCNIYLNSVQVAKTHAREGQNPVWSEEFVFDDLPPDINRFEITLSNKTKKSKDPDILFMRCQLSRLQKGHATDEWFLLSSHIPLKGIEPGSLRVRARYSMEKIMPEEEYSEFKELILQKELHVVYALSHVCGQDRTLLASILLRIFLHEKLESLLLCTLNDREISMEDEATTLFRATTLASTLMEQYMKATATQFVHHALKDSILKIMESKQSCELSPSKLEKNEDVNTNLTHLLNILSELVEKIFMASEILPPTLRYIYGCLQKSVQHKWPTNTTMRTRVVSGFVFLRLICPAILNPRMFNIISDSPSPIAARTLILVAKSVQNLANLVEFGAKEPYMEGVNPFIKSNKHRMIMFLDELGNVPELPDTTEHSRTDLSRDLAALHEICVAHSDELRTLSNERGAQQHVLKKLLAITELLQQKQNQYTKTNDVRXQPSPQCSAWIQHVQHGNSLQFNVSFALAKK

SEQ ID NO: 597 - protein, 432 aa, Homo Sapiens
  misc_feature (426)..(426): Xaa can be any naturally occurring amino acid
MADKEAAFDDAVEERVINEEYKIWKKNTPFLYDLVMTHALEWPSLTAQWLPDVTRPEGKDFSIHRLVLGTHTSDEQNHLVIASVQLPNDDAQFDASHYDSEKGEFGGFGSVSGKIEIEIKINHEGEVNRARYMPQNPCIIATKTPSSDVLVFDYTKHPSKPDPSGECNPDLRLRGHQKEGYGLSWNPNLSGHLLSASDDHTICLWDISAVPKEGKVVDAKTIFTGHTAVVEDVSWHLLHESLFGSVADDQKLMIWDTRSNNTSKPSHSVDAHTAEVNCLSFNPYSEFILATGSADKTVALWDLRNLKLKLHSFESHKDEIFQVQWSPHNETILASSGTDRRLNVWDLSKIGEEQSPEDAEDGPPELLFIHGGHTAKISDFSWNPNEPWVICSVSEDNIMQVWQMAENIYNDEDPEGSVDPEGQGSXICLYLL

SEQ ID NO: 598 - protein, 1097 aa, Homo Sapiens
  misc_feature (1069)..(1069): Xaa can be any naturally occurring amino acid
MFEDKPHAEGAAVVAAAGEALQALCQELNLDEGSAAEALDDFTAIRGNYSLEGEVTHWLACSLYVACRKSIIPTVGKGIMEGNCVSLTRILRSAKLSLIQFFSKMKKWMDMSNLPQEFRERIERLERNFEVSTVIFKKYEPIFLDIFQNPYEEPPKLPRSRKQRRIPCSVKDLFNFCWTLFVYTKGNFRMIGDDLVNSYHLLLCCLDLIFANAIMCPNRQDLLNPSFKGLPSDFHTADFTASEEPPCIIAVLCELHDGLLVEAKGIKEHYFKPYISKLFDRKILKGECLLDLSSFTDNSKAVNKEYEEYVLTVGDFDERIFLGADAEEEIGTPRKFTRDTPLGKLTAQANVEYNLQQHFEKKRSFAPSTPLTGRRYLREKEAVITPVASATQSVSRLQSIVAGLKNAPSDQLINIFESCVRNPVENIMKILKGIGETFCQHYTQSTDEQPGSHIDFAVNRLKLAEILYYKILETVMVQETRRLHGMDMSVLLEQDIFHRSLMACCLEIVLFAYSSPRTFPWIIEVLNLQPFYFYKVIEVVIRSEEGLSRDMVKHLNSIEEQILESLAWSHDSALWEALQVSANKVPTCEEVIFPNNFETGNGGNVQGHLPLMPMSPLMHPRVKEVRTDSGSLRRDMQPLSPISVHERYSSPTAGSAKRRLFGEDPPKEMLMDKIITEGTKLKIAPSSSITAENVSILPGQTLLTMATAPVTGTTGHKVTIPLHGVANDAGEITLIPLSMNTNQESKVKSPVSLTAHSLIGASPKQTNLTKAQEVHSTGINRPKRTGSLALFYRKVYHLASVRLRDLCLKLDVSNELRRKIWTCFEFTLVHCPDLMKDRHLDQLLLCAFYIMAKVTKEERTFQEIMKSYRNQPQANSHVYRSVLLKSIPREVVAYNKNINDDFEMIDCDLEDATKTPDCSSGPVKEERGDLIKFYNTIYVGRVKSFALKYDLANQDHMMDAPPLSPFPHIKQQPGSPRRISQQHSIYISPHKNGSGLTPRSALLYKFNGSPSKSLKDINNMIRQGEQRTKKRVIAIDSDAESPAKRVCQENDDVLLKRLQDVVSERANHXCCSCFYDKSTFRLFCRKLELCPSNLLAL

SEQ ID NO: 599 - protein, 1151 aa, Homo Sapiens
  misc_feature (1124)..(1124): Xaa can be any naturally occurring amino acid
MWGDSRPANRTGPFRGSQEERFAPGWNRDYPPPPLKSHAQERHSGNFPGRDSLPFDFQGHSGPPFANVEEHSFSYGARDGPHGDYRGGEGPGHDFRGGDFSSSDFQSRDSSQLDFRGRDIHSGDFRDREGPPMDYRGGDGTSMDYRGREAPHMNYRDRDAHAVDFRGRDAPPSDFRGRGTYDLDFRGRDGSHADFRGRDLSDLDFRAREQSRSDFRNRDVSDLDFRDKDGTQVDFRGRGSGTTDLDFRDRDTPHSDFRGRHRSRTDQDFRGREMGSCMEFKDREMPPVDPNILDYIQPSTQDREHSGMNVNRREESTHDHTIERPAFGIQKGEFEHSETREGETQGVAFEHESPADFQNSQSPVQDQDKSQLSGREEQSSDAGLFKEEGGLDFLGRQDTDYRSMEYRDVDHRLPGSQMFGYGQSKSFPEGKTARDAQRDLQDQDYRTGPSEEKPSRLIRLSGVPEDATKEEILNAFRTPDGMPVKNLQLKEYNTGYDYGYVCVEFSLLEDAIGCMEANQGTLMIQDKEVTLEYVSSLDFWYCKRCKANIGGHRSSCSFCKNPREVTEAKQELITYPQPQKTSIPAPLEKQPNQPLRPADKEPEPRKREEGQESRLGHQKREAERYLPPSRREGPTFRRDRERESWSGETRQDGESKTIMLKRIYRSTPPEVIVEVLEPYVRLTTANVRIIKNRTGPMGHTYGFIDLDSHAEALRVVKILQNLDPPFSIDGKMVAVNLATGKRRNDSGDHSDHMHYYQGKKYFRDRRGGGRNSDWSSDTNRQGQQSSSDCYIYDSATGYYYDPLAGTYYDPNTQQEVYVPQDPGLPEEEEIKEKKPTSQGKSSSKKEMSKRDGKEKKDRGVTRFQENASEGKAPAEDVFKKPLPPTVKKEESPPPPKVVNPLIGLLGEYGGDSDYEEEEEEEQTPPPQPRTAQPQKREEQTKKENEEDKLTDWNKLACLLCRRQFPNKEVLIKHQQLSDLHKQNLEIHRKIKQSEQELAYLERREREGKFKGRGNDRREKLQSFDSPERKRIKYSRETDSDRKLVDKEDIDTSSKGGCVQQATGWRKGTGLGYGHPGLASSEEAEGRMRGPSVGASGRTSKRQSNETYRDAVRRVMFARYKELDXERRQVPWDTTSLLFCLSLLFFCYCSCC

SEQ ID NO: 600 - protein, 627 aa, Homo Sapiens
  misc_feature (620)..(620): Xaa can be any naturally occurring amino acid
MASGAYNPYIEIIEQPRQRGMRFRYKCEGRSAGSIPGEHSTDNNRTYPSIQIMNYYGKGKVRITLVTKNDPYKPHPHDLVGKDCRDGYYEAEFGQERRPLFFQNLGIRCVKKKEVKEAIITRIKAGINPFNVPEKQLNDIEDCDLNVVRLCFQVFLPDEHGNLTTALPPVVSNPIYDNRAPNTAELRICRVNKNCGSVRGGDEIFLLCDKVQKDDIEVRFVLNDWEAKGIFSQADVHRQVAIVFKTPPYCKAITEPVTVKMQLRRPSDQEVSESMDFRYLPDEKDTYGNKAKKQKTTLLFQKLCQDHVETGFRHVDQDGLELLTSGDPPTLASQSAGITVNFPERPRPGLLGSIGEGRYFKKEPNLFSHDAVVREMPTGVSSQAESYYPSPGPISSGLSHHASMAPLPSSSWSSVAHPTPRSGNTNPLSSFSTRTLPSNSQGIPPFLRIPVGNDLNASNACIYNNADDIVGMEASSMPSADLYGISDPNMLSNCSVNMMTTSSDSMGETDNPRLLSMNLENPSCNSVLDPRDLRQLHQMSSSSMSAGANSNTTVFVSQSDAFEGSDFSCADNSMINESGPSNSTNPNSHGFVQDSQYSGIGSMQNEQLSDSFPYEFFQVXLARFKSF

SEQ ID NO: 601 - protein, 634 aa, Homo Sapiens
  misc_feature (580)..(580): Xaa can be any naturally occurring amino acid
MLRSGPASGPSVPTGRAMPSRRVARPPAAPELGALGSPDLSSLSLAVSRSTDELEIIDEYIKENGFGLDGGQPGPGEGLPRLVSRGAASLSTVTLGPVAPPATPPPWGCPLGRLVSPAPGPGPQPHLVITEQPKQRGMRFRYECEGRSAGSILGESSTEASKTLPAIELRDCGGLREVEVTACLVWKDWPHRVHPHSLVGKDCTDGICRVRLRPHVSPRHSFNNLGIQCVRKKEIEAAIERKIQLGIDPYNAGSLKNHQEVDMNVVRICFQASYRDQQGQMRRMDPVLSEPVYDKKSTNTSELRICRINKESGPCTGGEELYLLCDKVQKEDISVVFSRASWEGRADFSQADVHRQIAIVFKTPPYEDLEIVEPVTVNVFLQRLTDGVCSEPLPFTYLPRDHDSYGVDKKRKRGMPDVLGELNSSDPHGIESKRRKKKPAILDHFLPNHGSGPFLPPSALLPDPDFFSGTVSLPGLEPPGGPDLLDDGFAYDPTAPTLFTMLDLLPPAPPHASAVVCSGGAGAVVGETPGPEPLTLDSYQAPGPGDGGTASLVGSNMFPNHYREAAFGGGLLSPGPEATXPRDARGGALGGEGGGGAVQSQPGCLAPPSPWPFLMLLKWTYSALARSSVARVSP

SEQ ID NO: 602 - protein, 1141 aa, Homo Sapiens
  misc_feature (1115)..(1115): Xaa can be any naturally occurring amino acid
MAKATSGAAGLRLLLLLLLPLLGKVALGLYFSRDAYWEKLYVDQAAGTPLLYVHALRDAPEEVPSFRLGQHLYGTYRTRLHENNWICIQEDTGLLYLNRSLDHSSWEKLSVRNRGFPLLTVYLKVFLSPTSLREGECQWPGCARVYFSFFNTSFPACSSLKPRELCFPETRPSFRIRENRPPGTFHQFRLLPVQFLCPNISVAYRLLEGEGLPFRCAPDSLEVSTRWALDREQREKYELVAVCTVHAGAREEVVMVPFPVTVYDEDDSAPTFPAGVDTASAVVEFKRKEDTVVATLRVFDADVVPASGELVRRYTSTLLPGDTWAQQTFRVEHWPNETSVQANGSFVRATVHDYRLVLNRNLSISENRTMQLAVLVNDSDFQGPGAGVLLLHFNVSVLPVSLHLPSTYSLSVSRRARRFAQIGKVCVENCQAFSGINVQYKLHSSGANCSTLGVVTSAEDTSGILFVNDTKALRRPKCAELHYMVVATDQQTSRQAQAQLLVTVEGSYVAEEAGCPLSCAVSKRRLECEECGGLGSPTGRCEWRQGDGKGITRNFSTCSPSTKTCPDGHCDVVETQDINICPQDCLRGSIVGGHEPGEPRGIKAGYGTCNCFPEEEKCFCEPEDIQDPLCDELCRTVIAAAVLFSFIVSVLLSAFCIHCYHKFAHKPPISSAEMTFRRPAQAFPVSYSSSGARRPSLDSMENQVSVDAFKILEDPKWEFPRKNLVLGKTLGEGEFGKVVKATAFHLKGRAGYTTVAVKMLKENASPSELRDLLSEFNVLKQVNHPHVIKLYGACSQDGPLLLIVEYAKYGSLRGFLRESRKVGPGYLGSGGSRNSSSLDHPDERALTMGDLISFAWQISQGMQYLAEMKLVHRDLAARNILVAEGRKMKISDFGLSRDVYEEDSYVKRSQGRIPVKWMAIESLFDHIYTTQSDVWSFGVLLWEIVTLGGNPYPGIPPERLFNLLKTGHRMERPDNCSEEMYRLMLQCWKQEPDKRPVFADISKDLEKMMVKRRDYLDLAASTPSDSLIYDDGLSEEETPLVDCNNAPLPRALPSTWIENKLYGMSDPNWPGESPVPLTRADGTNTGFPRYPNDSVYANWMLSPSAAKLMDTFDSXHFFVKGNGLTRGRNMLRMESLPALSL

SEQ ID NO: 603 - protein, 247 aa, Homo Sapiens; identical to SEQ ID NO: 21
  misc_feature (194)..(194): Xaa can be any naturally occurring amino acid

SEQ ID NO: 604 - protein, 273 aa, Homo Sapiens
  misc_feature (197)..(197): Xaa can be any naturally occurring amino acid
MAAIRKKLVVVGDGACGKTCLLIVFSKDEFPEVYVPTVFENYVADIEVDGKQVELALWDTAGQEDYDRLRPLSYPDTDVILMCFSVDSPDSLENIPEKWVPEVKHFCPNVPIILVANKKDLRSDEHVRTELARMKQEPVRTDDGRAMAVRIQAYDYLECSAKTKEGVREVFETATRAALQKRYGSQNGCINCCKVLXGPRPSRLPLPARLPLLDQSPASPEKGRPVSHKDPTGLPGICLLTPLACARTWRGHRAPPSQCLCASSCVAQAWAPH

SEQ ID NO: 605 - protein, 224 aa, Homo Sapiens
  misc_feature (194)..(194): Xaa can be any naturally occurring amino acid
MAAIRKKLVIVGDGACGKTCLLIVFSKDQFPEVYVPTVFENYIADIEVDGKQVELALWDTAGQEDYDRLRPLSYPDTDVILMCFSIDSPDSLENIPEKWTPEVKHFCPNVPIILVGNKKDLRQDEHTRRELAKMKQEPVRSEEGRDMANRISAFGYLECSAKTKEGVREVFEMATRAGLQVRKNKRRRGCPILXDPQGLSYMPPPFTGVQKLSPYNPSLLRAPC

SEQ ID NO: 606 - protein, 338 aa, Homo Sapiens
  misc_feature (271)..(271): Xaa can be any naturally occurring amino acid
MWNSGFESYGSSSYGGAGGYTQSPGGFGSPAPSQAEKKSRARAQHIVPCTISQLLSATLVDEVFRIGNVEISQVTIVGIIRHAEKAPTNIVYKIDDMTAAPMDVRQWVDTDDTSSENTVVPPETYVKVAGHLRSFQNKKSLVAFKIMPLEDMNEFTTHILEVINAHMVLSKANSQPSAGRAPISNPGMSEAGNFGGNSFMPANGLTVAQNQVLNLIKACPRPEGLNFQDLKNQLKHMSVSSIKQAVDFLSNEGHIYSTVDDDHFKSTDAEXLDLTGYLRYFTAGPSFTICCLQLCICLARGLLGSRFHLSNVSSDFLLKLTALLFYFVLFEAQREMGN

SEQ ID NO: 607 - protein, 143 aa, Homo Sapiens
  misc_feature (137)..(137): Xaa can be any naturally occurring amino acid
MGKFMKPGKVVLVLAGRYSGRKAVIVKNIDDGTSDRPYSHALVAGIDRYPRKVTAAMGKKKIAKRSKIKSFVKVYNYNHLMPTRYSVDIPLDKTVVNKDVFRDPALKRKARREAKVKFEERYKTGKNKWFFQKLRFXMLCFDH

SEQ ID NO: 608 - protein, 786 aa, Homo Sapiens
  misc_feature (736)..(736): Xaa can be any naturally occurring amino acid
MPLAQLKEPWPLMELVPLDPENGQTSGEEAGLQPSKDEGVLKEISITHHVKAGSEKADPSHFELLKVLGQGSFGKVFLVRKVTRPDSGHLYAMKVLKKATLKVRDRVRTKMERDILADVNHPFVVKLHYAFQTEGKLYLILDFLRGGDLFTRLSKEVMFTEEDVKFYLAELALGLDHLHSLGIIYRDLKPENILLDEEGHIKLTDFGLSKEAIDHEKKAYSFCGTVEYMAPEVVNRQGHSHSADWWSYGVLMFEMLTGSLPFQGKDRKETMTLILKAKLGMPQFLSTEAQSLLRALFKRNPANRLGSGPDGAEEIKRHVFYSTIDWNKLYRREIKPPFKPAVAQPDDTFYFDTEFTSRTPKDSPGIPPSAGAHQLFRGFSFVATGLMEDDGKPRAPQAPLHSVVQQLHGKNLVFSDGYVVKETIGVGSYSECKRCVHKATNMEYAVKVIDKSKRDPSEEIEILLRYGQHPNIITLKDVYDDGKHVYLVTELMRGGELLDKILRQKFFSEREASFVLHTIGKTVEYLHSQGVVHRDLKPSNILYVDESGNPECLRICDFGFAKQLRAENGLLMTPCYTANFVAPEVLKRQGYDEGCDIWSLGILLYTMLAGYTPFANGPSDTPEEILTRIGSGKFTLSGGNWNTVSETAKDLVSKMLHVDPHQRLTAKQVLQHPWVTQKDKLPQSQLSHQDLQLVKGAMAATYSALNSSKPTPQLKPIESSILAQRRVRKLPSTTLXGTRAFGPQGGASLTQSACFPEGAGRNHRARGSWNPRGRGSCQPRTPLMRV

SEQ ID NO: 609 - protein, 752 aa, Homo Sapiens
  misc_feature (741)..(741): Xaa can be any naturally occurring amino acid
MPLAQLADPWQKMAVESPSDSAENGQQIMDEPMGEEEINPQTEEVSIKEIAITHHVKEGHEKADPSQFELLKVLGQGSFGKVFLVKKISGSDARQLYAMKVLKKATLKVRDRVRTKMERDILVEVNHPFIVKLHYAFQTEGKLYLILDFLRGGDLFTRLSKEVMFTEEDVKFYLAELALALDHLHSLGIIYRDLKPENILLDEEGHIKLTDFGLSKESIDHEKKAYSFCGTVEYMAPEVVNRRGHTQSADWWSFGVLMFEMLTGTLPFQGKDRKETMTMILKAKLGMPQFLSPEAQSLLRMLFKRNPANRLGAGPDGVEEIKRHSFFSTIDWNKLYRREIHPPFKPATGRPEDTFYFDPEFTAKTPKDSPGIPPSANAHQLFRGFSFVAITSDDESQAMQTVGVHSIVQQLHRNSIQFTDGYEVKEDIGVGSYSVCKRCIHKATNMEFAVKIIDKSKRDPTEEIEILLRYGQHPNIITLKDVYDDGKYVYVVTELMKGGELLDKILRQKFFSEREASAVLFTITKTVEYLHAQGVVHRDLKPSNILYVDESGNPESIRICDFGFAKQLRAENGLLMTPCYTANFVAPEVLKRQGYDAACDIWSLGVLLYTMLTGYTPFANGPDDTPEEILARIGSGKFSLSGGYWNSVSDTAKDLVSKMLHVDPHQRLTAALVLRHPWIVHWDQLPQYQLNRQDAPHLVKGAMAATYSALNRNQSPVLEPVGRSTLAQRRGIKKITSTALXSDLSEIFGTMV

SEQ ID NO: 610 - protein, 510 aa, Homo Sapiens
  misc_feature (463)..(463): Xaa can be any naturally occurring amino acid
MDTKHFLPLDFSTQVNSSLTSPTGRGSMAAPSLHPSLGPGIGSPGQLHSPISTLSSPINGMGPPFSVISSPMGPHSMSVPTTPTLGFSTGSPQLSSPMNPVSSSEDIKPPLGLNGVLKVPAHPSGNMASFTKHICAICGDRSSGKHYGVYSCEGCKGFFKRTVRKDLTYTCRDNKDCLIDKRQRNRCQYCRYQKCLAMGMKREAVQEERQRGKDRNENEVESTSSANEDMPVERILEAELAVEPKTETYVEANMGLNPSSPNDPVTNICQAADKQLFTLVEWAKRIPHFSELPLDDQVILLRAGWNELLIASFSHRSIAVKDGILLATGLHVHRNSAHSAGVGAIFDRVLTELVSKMRDMQMDKTELGCLRAIVLFNPDSKGLSNPAEVEALREKVYASLEAYCKHKYPEQPGRFAKLLLRLPALRSIGLKCLEHLFFFKLIGDTPIDTFLMEMLEAPHQMTXACGPILCAHPFWPPCLDASCSSQPEPCPCPSLPGLFGLWGTACHCSA

SEQ ID NO: 611 - protein, 567 aa, Homo Sapiens
  misc_feature (534)..(534): Xaa can be any naturally occurring amino acid
MSWAARPPFLPQRHAAGQCGPVGVRKEMHCGVASRWRRRRPWLDPAAAAAAAVAGGEQQTPEPEPGEAGRDGMGDSGRDSRSPDSSSPNPLPQGVPPPSPPGPPLPPSTAPSLGGSGAPPPPPMPPPPLGSPFPVISSSMGSPGLPPPAPPGFSGPVSSPQINSTVSLPGGGSGPPEDVKPPVLGVRGLHCPPPPGGPGAGKRLCAICGDRSSGKHYGVYSCEGCKGFFKRTIRKDLTYSCRDNKDCTVDKRQRNRCQYCRYQKCLATGMKREAVQEERQRGKDKDGDGEGAGGAPEEMPVDRILEAELAVEQKSDQGVEGPGGTGGSGSSPNDPVTNICQAADKQLFTLVEWAKRIPHFSSLPLDDQVILLRAGWNELLIASFSHRSIDVRDGILLATGLHVHRNSAHSAGVGAIFDRVLTELVSKMRDMRMDKTELGCLRAIILFNPDAKGLSNPSEVEVLREKVYASLETYCKQKYPEQQGRFAKLLLRLPALRSIGLKCLEHLFFFKLIGDTPIDTFLMEMLEAPHQLAXAQTQTWCFSHWRSTHPRGTPSPGAGWGAMFPEP

SEQ ID NO: 612 - protein, 502 aa, Homo Sapiens
  misc_feature (464)..(464): Xaa can be any naturally occurring amino acid
MYGNYSHFMKFPAGYGGSPGHTGSTSMSPSAALSTGKPMDSHPSYTDTPVSAPRTLSAVGTPLNALGSPYRVITSAMGPPSGALAAPPGINLVAPPSSQLNVVNSVSSSEDIKPLPGLPGIGNMNYPSTSPGSLVKHICAICGDRSSGKHYGVYSCEGCKGFFKRTIRKDLIYTCRDNKDCLIDKRQRNRCQYCRYQKCLVMGMKREAVQEERQRSRERAESEAECATSGHEDMPVERILEAELAVEPKTESYGDMNMENSTNDPVTNICHAADKQLFTLVEWAKRIPHFSDLTLEDQVILLRAGWNELLIASFSHRSVSVQDGILLATGLHVHRSSAHSAGVGSIFDRVLTELVSKMKDMQMDKSELGCLRAIVLFNPDAKGLSNPSEVETLREKVYATLEAYTKQKYPEQPGRFAKLLLRLPALRSIGLKCLEHLFFFKLIGDTPIDTFLMEMLETPLQITXAPPATASPPRMTPGQVCVDPHPALSSTSHPDPLPVPKM

SEQ ID NO: 613 - protein, 126 aa, Homo Sapiens
  misc_feature (95)..(95): Xaa can be any naturally occurring amino acid
MGSELETAMETLINVFHAHSGKEGDKYKLSKKELKELLQTELSGFLDAQKDVDAVDKVMKELDENGDGEVDFQEYVVLVAALTVACNNFFWENSXADSHIGQRPSSPPSQTCLFPLLPPHPTYPSP

SEQ ID NO: 614 - protein, 105 aa, Homo Sapiens
  misc_feature (102)..(102): Xaa can be any naturally occurring amino acid
MACPLEKALDVMVSTFHKYSGKEGDKFKLNKSELKELLTRELPSFLGKRTDEAAFQKLMSNLDSNRDNEVDFQEYCVFLSCIAMMCNEFFEGFPDKQPRKKXKLL

SEQ ID NO: 615 - protein, 814 aa, Homo Sapiens
  misc_feature (801)..(801): Xaa can be any naturally occurring amino acid
MGSSKKHRGEKEAAGTTAAAGTGGATEQPPRHREHKKHKHRSGGSGGSGGERRKRSRERGGERGSGRRGAEAEARSSTHGRERSQAEPSERRVKREKRDDGYEAAASSKTSSGDASSLSIEETNKLRAKLGLKPLEVNAIKKEAGTKEEPVTADVINPMALRQREELREKLAAAKEKRLLNQKLGKIKTLGEDDPWLDDTAAWIERSRQLQKEKDLAEKRAKLLEEMDQEFGVSTLVEEEFGQRRQDLYSARDLQGLTVEHAIDSFREGETMILTLKDKGVLQEEEDVLVNVNLVDKERAEKNVELRKKKPDYLPYAEDESVDDLAQQKPRSILSKYDEELEGERPHSFRLEQGGTADGLRERELEEIRAKLRLQAQSLSTVGPRLASEYLTPEEMVTFKKTKRRVKKIRKKEKEVVVRADDLLPLGDQTQDGDFGSRLRGRGRRRVSEVEEEKEPVPQPLPSDDTRVENMDISDEEEGGAPPPGSPQVLEEDEAELELQKQLEKGRRLRQLQQLQQLRDSGEKVVEIVKKLESRQRGWEEDEDPERKGAIVFNATSEFCRTLGEIPTYGLAGNREEQEELMDFERDEERSANGGSESDGEENIGWSTVNLDEEKQQQDFSASSTTILDEEPIVNRGLAAALLLCQNKGLLETTVQKVARVKAPNKSLPSAVYCIEDKMAIDDKYSRREEYRGFTQDFKEKDGYKPDVKIEYVDETGRKLTPKEAFRQLSHRFHGKGSGKMKTERRMKKLDEEALLKKMSSSDTPLGTVALLQEKQKAQKTPYIVLSGSGKSMNANTITKXQRPPAPALPQPSY

SEQ ID NO: 616 - protein, 104 aa, Homo Sapiens
  misc_feature (91)..(91): Xaa can be any naturally occurring amino acid
MKLSVCLLLVTLALCCYQANAEFCPALVSELLDFFFISEPLFKLSLAKFDAPPEAVAAKLGVKRCTDQMSLQKRSLIAEVLVKILKKCSVXHVKTFILVSTVFQ

SEQ ID NO: 617 - protein, 331 aa, Homo Sapiens
  misc_feature (311)..(311): Xaa can be any naturally occurring amino acid
MRRAALWLWLCALALSLQPALPQIVATNLPPEDQDGSGDDSDNFSGSGAGALQDITLSQQTPSTWKDTQLLTAIPTSPEPTGLEATAASTSTLPAGEGPKEGEAVVLPEVEPGLTAREQEATPRPRETTQLPTTHQASTTTATTAQEPATSHPHRDMQPGHHETSTPAGPSQADLHTPHTEDGGPSATERAAEDGASSQLPAAEGSGEQDFTFETSGENTAVVAVEPDRRNQSPVDQGATGASQGLLDRKEVLGGVIAGGLVGLIFAVCLVGFMLYRMKKKDEGSYSLEEPKQANGGAYQKPTKQEEFYAXRGSHAPPPPCHSLGPHLPLP

SEQ ID NO: 618 - protein, 796 aa, Homo Sapiens
  misc_feature (749)..(749): Xaa can be any naturally occurring amino acid
MGRAGAAAVIPGLALLWAVGLGSAAPSPPRLRLSFQELQAWHGLQTFSLERTCCYQALLVDEERGRLFVGAENHVASLNLDNISKRAKKLAWPAPVEWREECNWAGKDIGTECMNFVKLLHAYNRTHLLACGTGAFHPTCAFVEVGHRAEEPVLRLDPGRIEDGKGKSPYDPRHRAASVLVGEELYSGVAADLMGRDFTIFRSLGQRPSLRTEPHDSRWLNEPKFVKVFWIPESENPDDDKIYFFFRETAVEAAPALGRLSVSRVGQICRNDVGGQRSLVNKWTTFLKARLVCSVPGVEGDTHFDQLQDVFLLSSRDHRTPLLYAVFSTSSIFQGSAVCVYSMNDVRRAFLGPFAHKEGPMHQWVSYQGRVPYPRPGMCPSKTFGTFSSTKDFPDDVIQFARNHPLMYNSVLPTGGRPLFLQVGANYTFTQIAADRVAAADGHYDVLFIGTDVGTVLKVISVPKGSRPSAEGLLLEELHVFEDSAAVTSMQISSKRHQLYVASRSAVAQIALHRCAAHGRVCTECCLARDPYCAWDGVACTRFQPSAKRRFRRQDVRNGDPSTLCSGDSSRPALLEHKVFGVEGSSAFLECEPRSLQARVEWTFQRAGVTAHTQVLAEERTERTARGLLLRRLRRRDSGVYLCAAVEQGFTQPLRRLSLHVLSATQAERLARAEEAAPAAPPGPKLWYRDFLQLVEPGGGGSANSLRMCRPQPALQSLPLESRRKGRNRRTHAPEPRAERGPRSATHWXPDCPHAGNQAGDDRRERSQTDPEKKDGLGPGTLGVTGRWRHQPTGPG

SEQ ID NO: 619 - protein, 797 aa, Homo Sapiens
  misc_feature (750)..(750): Xaa can be any naturally occurring amino acid
MGRAGAAAVIPGLALLWAVGLGSAAPSPPRLRLSFQELQAWHGLQTFSLERTCCYQALLVDEERGRLFVGAENHVASLNLDNISKRAKKLAWPAPVEWREECNWAGKDIGTECMNFVKLLHAYNRTHLLACGTGAFHPTCAFVEVGHRAEEPVLRLDPGRIEDGKGKSPYDPRHRAASVLVGEELYSGVAADLMGRDFTIFRSLGQRPSLRTEPHDSRWLNEPKFVKVFWIPESENPDDDKIYFFFRETAVEAAPALGRLSVSRVGQICRNDVGGQRSLVNKWTTFLKARLVCSVPGVEGDTHFDQLQDVFLLSSRDHRTPLLYAVFSTSSSIFQGSAVCVYSMNDVRRAFLGPFAHKEGPMHQWVSYQGRVPYPRPGMCPSKTFGTFSSTKDFPDDVIQFARNHPLMYNSVLPTGGRPLFLQVGANYTFTQIAADRVAAADGHYDVLFIGTDVGTVLKVISVPKGSRPSAEGLLLEELHVFEDSAAVTSMQISSKRHQLYVASRSAVAQIALHRCAAHGRVCTECCLARDPYCAWDGVACTRFQPSAKRRFRRQDVRNGDPSTLCSGDSSRPALLEHKVFGVEGSSAFLECEPRSLQARVEWTFQRAGVTAHTQVLAEERTERTARGLLLRRLRRRDSGVYLCAAVEQGFTQPLRRLSLHVLSATQAERLARAEEAAPAAPPGPKLWYRDFLQLVEPGGGGSANSLRMCRPQPALQSLPLESRRKGRNRRTHAPEPRAERGPRSATHWXPDCPHAGNQAGDDRRERSQTDPEKKDGLGPGTLGVTGRWRHQPTGPG

SEQ ID NO: 620 - protein, 377 aa, Homo Sapiens
  misc_feature (362)..(362): Xaa can be any naturally occurring amino acid
MSKQQPTQFINPETPGYVGFANLPNQVHRKSVKKGFEFTLMVVGESGLGKSTLINSLFLTDLYPERVIPGAAEKIERTVQIEASTVEIEERGVKLRLTVVDTPGYGDAINCRDCFKTIISYIDEQFERYLHDESGLNRRHIIDNRVHCCFYFISPFGHGLKPLDVAFMKAIHNKVNIVPVIAKADTLTLKERERLKKRILDEIEEHNIKIYHLPDAESDEDEDFKEQTRLLKASIPFSVVGSNQLIEAKGKKVRGRLYPWGVVEVENPEHNDFLKLRTMLITHMQDLQEVTQDLHYENFRSERLKRGGRKVENEDMNKDQILLEKEAELRRMQEMIARMQAQMQMQMQGGDGDGGALGHHVXGDVHISRSQRKHFPG

SEQ ID NO: 621 - protein, 399 aa, Homo Sapiens
  misc_feature (391)..(391): Xaa can be any naturally occurring amino acid
MNSLSEANTKFMFDLFQQFRKSKENNIFYSPISITSALGMVLLGAKDNTAQQISKVLHFDQVTENTTEKAATYHVDRSGNVHHQFQKLLTEFNKSTDAYELKIANKLFGEKTYQFLQEYLDAIKKFYQTSVESTDFANAPEESRKKINSWVESQTNEKIKNLFPDGTIGNDTTLVLVNAIYFKGQWENKFKKENTKEEKFWPNKNTYKSVQMMRQYNSFNFALLEDVQAKVLEIPYKGKDLSMIVLLPNEIDGLQKLEEKLTAEKLMEWTSLQNMRETCVDLHLPRFKMEESYDLKDTLRTMGMVNIFNGDADLSGMTWSHGLSVSKVLHKAFVEVTEEGVEAAAATAVVVVELSSPSTNEEFCCNHPFLFFIRQNKTNSILFYGRFSSPXMQLVCHSI

SEQ ID NO: 622 - protein, 296 aa, Homo Sapiens
  misc_feature (249)..(249): Xaa can be any naturally occurring amino acid
MERASLIQKAKLAEQAERYEDMAAFMKGAVEKGEELSCEERNLLSVAYKNVVGGQRAAWRVLSSIEQKSNEEGSEEKGPEVREYREKVETELQGVCDTVLGLLDSHLIKEAGDAESRVFYLKMKGDYYRYLAEVATGDDKKRIIDSARSAYQEAMDISKKEMPPTNPIRLGLALNFSVFHYEIANSPEEAISLAKTTFDEAMADLHTLSEDSYKDSTLIMQLLRDNLTLWTADNAGEEGGEAPQEPQSXVLPATAPPCPLQSPTLPRGLVWGGRPHPSPLGAVLAPKGSVERDWQS

SEQ ID NO: 623 - protein, 414 aa, Homo Sapiens
  misc_feature (390)..(390): Xaa can be any naturally occurring amino acid
MAEPDPSHPLETQAGKVQEAQDSDSDSEGGAAGGEADMDFLRNLFSQTLSLGSQKERLLDELTLEGVARYMQSERCRRVICLVGAGISTSAGIPDFRSPSTGLYDNLEKYHLPYPEAIFEISYFKKHPEPFFALAKELYPGQFKPTICHYFMRLLKDKGLLLRCYTQNIDTLERIAGLEQEDLVEAHGTFYTSHCVSASCRHEYPLSWMKEKIFSEVTPKCEDCQSLVKPDIVFFGESLPARFFSCMQSDFLKVDLLLVMGTSLQVQPFASLISKAPLSTPRLLINKEKAGQSDPFLGMIMGLGGGMDFDSKKAYRDVAWLGECDQGCLALAELLGWKKELEDLVRREHASIDAQSGAGVPNPSTSASPKKSPPPAKDEARTTEREKPQXQLHLPGGMPSSSGTAEPQPGLAPS

SEQ ID NO: 624 - protein, 377 aa, Homo Sapiens
  misc_feature (353)..(353): Xaa can be any naturally occurring amino acid
MDFLRNLFSQTLSLGSQKERLLDELTLEGVARYMQSERCRRVICLVGAGISTSAGIPDFRSPSTGLYDNLEKYHLPYPEAIFEISYFKKHPEPFFALAKELYPGQFKPTICHYFMRLLKDKGLLLRCYTQNIDTLERIAGLEQEDLVEAHGTFYTSHCVSASCRHEYPLSWMKEKIFSEVTPKCEDCQSLVKPDIVFFGESLPARFFSCMQSDFLKVDLLLVMGTSLQVQPFASLISKAPLSTPRLLINKEKAGQSDPFLGMIMGLGGGMDFDSKKAYRDVAWLGECDQGCLALAELLGWKKELEDLVRREHASIDAQSGAGVPNPSTSASPKKSPPPAKDEARTTEREKPQXQLHLPGGMPSSSGTAEPQPGLAPS

SEQ ID NO: 625 - protein, 435 aa, Homo Sapiens
  misc_feature (425)..(425): Xaa can be any naturally occurring amino acid
MHRKHLQEIPDLSSNVATSFTWGWDSSKTSELLSGMGVSALEKEEPDSENIPQELLSNLGHPESPPRKRLKSKGSDKDFVIVRRPKLNRENFPGVSWDSLPDELLLGIFSCLCLPELLKVSGVCKRWYRLASDESLWQTLDLTGKNLHPDVTGRLLSQGVIAFRCPRSFMDQPLAEHFSPFRVQHMDLSNSVIEVSTLHGILSQCSKLQNLSLEGLRLSDPIVNTLAKNSNLVRLNLSGCSGFSEFALQTLLSSCSRLDELNLSWCFDFTEKHVQVAVAHVSETITQLNLSGYRKNLQKSDLSTLVRRCPNLVHLDLSDSVMLKNDCFQEFFQLNYLQHLSLSRCYDIIPETLLELGEIPTLKTLQVFGIVPDGTLQLLKEALPHLQINCSHFTTIARPTIGNKKNQEIWGIKCRLTLQKPSCLXSIYCRMVSLL

SEQ ID NO: 626 - protein, 415 aa, Homo Sapiens
  misc_feature (411)..(411): Xaa can be any naturally occurring amino acid
MHRKHLQEIPDLSSNVATSFTWGWDSSKTSELLSGMGVSALEKEEPDSENIPQELLSNLGHPESPPRKRLKSKGSDKDFVIVRRPKLNRENFPGVSWDSLPDELLLGIFSCLCLPELLKVSGVCKRWYRLASDESLWQTLDLTGKNLHPDVTGRLLSQGVIAFRCPRSFMDQPLAEHFSPFRVQHMDLSNSVIEVSTLHGILSQCSKLQNLSLEGLRLSDPIVNTLAKNSNLVRLNLSGCSGFSEFALQTLLSSCSRLDELNLSWCFDFTEKHVQVAVAHVSETITQLNLSGYRKNLQKSDLSTLVRRCPNLVHLDLSDSVMLKNDCFQEFFQLNYLQHLSLSRCYDIIPETLLLVTRAGVRIRLDSDIGCPQTYRTSKLKSSHKLFCQHVRVICIFVCDFYFYRLVLKQXNTFL

SEQ ID NO: 627 - protein, 737 aa, Homo Sapiens
  misc_feature (592)..(592): Xaa can be any naturally occurring amino acid
MVPSSPAVEKQVPVEPGPDPELRSWRHLVCYLCFYGFMAQIRPGESFITPYLLGPDKNFTREQVTNEITPVLSYSYLAVLVPVFLLTDYLRYTPVLLLQGLSFVSVWLLLLLGHSVAHMQLMELFYSVTMAARIAYSSYIFSLVRPARYQRVAGYSRAAVLLGVFTSSVLGQLLVTVGRVSFSTLNYISLAFLTFSVVLALFLKRPKRSLFFNRDDRGRCETSASELERMNPGPGGKLGHALRVACGDSVLARMLRELGDSLRRPQLRLWSLWWVFNSAGYYLVVYYVHILWNEVDPTTNSARVYNGAADAASTLLGAITSFAAGFVKIRWARWSKLLIAGVTATQAGLVFLLAHTRHPSSIWLCYAAFVLFRGSYQFLVPIATFQIASSLSKELCALVFGVNTFFATIVKTIITFIVSDVRGLGLPVRKQFQLYSVYFLILSIIYFLGAMLDGLRHCQRGHHPRQPPAQGLRSAAEEKAAQALSVQDKGLGGLQPAQSPPLSPEDSLGAVGPASLEQRQSDPYLAQAPAPQAAEFLSPVTTPSPCTLCSAQASGPEAADETCPQLAVHPPGVSKLGLQCLPSDGVQNVNQXLSGAPVVTLQAALSASPRPLPRGPPALAMGASAYPASRPPRIPPALCRTLAVATACWRHSGQLPGHAVPALCPAGFVAGRGGWWASASTRPHWLMPLGGLETNPFCPPGLVKWPLGYQLRGHWPHRSCEPSRAGWEPGPSGVAEL

SEQ ID NO: 628 - protein, 547 aa, Homo Sapiens
  misc_feature (493)..(493): Xaa can be any naturally occurring amino acid
MEPSSKKLTGRLMLAVGGAVLGSLQFGYNTGVINAPQKVIEEFYNQTWVHRYGESILPTTLTTLWSLSVAIFSVGGMIGSFSVGLFVNRFGRRNSMLMMNLLAFVSAVLMGFSKLGKSFEMLILGRFIIGVYCGLTTGFVPMYVGEVSPTAFRGALGTLHQLGIVVGILIAQVFGLDSIMGNKDLWPLLLSIIFIPALLQCIVLPFCPESPRFLLINRNEENRAKSVLKKLRGTADVTHDLQEMKEESRQMMREKKVTILELFRSPAYRQPILIAVVLQLSQQLSGINAVFYYSTSIFEKAGVQQPVYATIGSGIVNTAFTVVSLFVVERAGRRTLHLIGLAGMAGCAILMTIALALLEQLPWMSYLSIVAIFGFVAFFEVGPGPIPWFIVAELFSQGPRPAAIAVAGFSNWTSNFIVGMCFQYVEQLCGPYVFIIFTVLLVLFFIFTYFKVPETKGRTFDEIASGFRQGGASQSDKTPEELFHPLGADSQVXVAPDHQPGLLPAALRISQEHRQLDETSKPDRCQPSRAWGSFLQPAMMSRRIFRT

SEQ ID NO: 629 - protein, 604 aa, Homo Sapiens
  misc_feature (569)..(569): Xaa can be any naturally occurring amino acid
MELQPPEASIAVVSIPRQLPGSHSEAGVQGLSAGDDSGTMSQDTEVDMKEVELNELEPEKQPMNAASGAAMSLAGAEKNGLVKIKVAEDEAEAAAAAKFTGLSKEELLKVAGSPGWVRTRWALLLLFWLGWLGMLAGAVVIIVRAPRCRELPAQKWWHTGALYRIGDLQAFQGHGAGNLAGLKGRLDYLSSLKVKGLVLGPIHKNQKDDVAQTDLLQIDPNFGSKEDFDSLLQSAKKKSIRVILDLTPNYRGENSWFSTQVDTVATKVKDALEFWLQAGVDGFQVRDIENLKDASSFLAEWQNITKGFSEDRLLIAGTNSSDLQQILSLLESNKDLLLTSSYLSDSGSTGEHTKSLVTQYLNATGNRWCSWSLSQARLLTSFLPAQLLRLYQLMLFTLPGTPVFSYGDEIGLDAAALPGQPMEAPVMLWDESSFPDIPGAVSANMTVKGQSEDPGSLLSLFRRLSDQRSKERSLLHGDFHAFSAGPGLFSYIRHWDQNERFLVVLNFGDVGLSAGLQASDLPASASLPAKADLLLSTQPGREEGSPLELERLKLEPHEGLLLRFPYAAXLQPDMDPLPFSFPSQALWLLIFLFFKNKQTNCCRL

SEQ ID NO: 630 - protein, 565 aa, Homo Sapiens
  misc_feature (530)..(530): Xaa can be any naturally occurring amino acid
MSQDTEVDMKEVELNELEPEKQPMNAASGAAMSLAGAEKNGLVKIKVAEDEAEAAAAAKFTGLSKEELLKVAGSPGWVRTRWALLLLFWLGWLGMLAGAVVIIVRAPRCRELPAQKWWHTGALYRIGDLQAFQGHGAGNLAGLKGRLDYLSSLKVKGLVLGPIHKNQKDDVAQTDLLQIDPNFGSKEDFDSLLQSAKKKSIRVILDLTPNYRGENSWFSTQVDTVATKVKDALEFWLQAGVDGFQVRDIENLKDASSFLAEWQNITKGFSEDRLLIAGTNSSDLQQILSLLESNKDLLLTSSYLSDSGSTGEHTKSLVTQYLNATGNRWCSWSLSQARLLTSFLPAQLLRLYQLMLFTLPGTPVFSYGDEIGLDAAALPGQPMEAPVMLWDESSFPDIPGAVSANMTVKGQSEDPGSLLSLFRRLSDQRSKERSLLHGDFHAFSAGPGLFSYIRHWDQNERFLVVLNFGDVGLSAGLQASDLPASASLPAKADLLLSTQPGREEGSPLELERLKLEPHEGLLLRFPYAAXLQPDMDPLPFSFPSQALWLLIFLFFKNKQTNCCRL

SEQ ID NO: 631 - protein, 666 aa, Homo Sapiens
  misc_feature (631)..(631): Xaa can be any naturally occurring amino acid
MELQPPEASIAVVSIPRQLPGSHSEAGVQGLSAGDDSELGSHCVAQTGLELLASGDPLPSASQNAEMIETGSDCVTQAGLQLLASSDPPALASKNAEVTGTMSQDTEVDMKEVELNELEPEKQPMNAASGAAMSLAGAEKNGLVKIKVAEDEAEAAAAAKFTGLSKEELLKVAGSPGWVRTRWALLLLFWLGWLGMLAGAVVIIVRAPRCRELPAQKWWHTGALYRIGDLQAFQGHGAGNLAGLKGRLDYLSSLKVKGLVLGPIHKNQKDDVAQTDLLQIDPNFGSKEDFDSLLQSAKKKSIRVILDLTPNYRGENSWFSTQVDTVATKVKDALEFWLQAGVDGFQVRDIENLKDASSFLAEWQNITKGFSEDRLLIAGTNSSDLQQILSLLESNKDLLLTSSYLSDSGSTGEHTKSLVTQYLNATGNRWCSWSLSQARLLTSFLPAQLLRLYQLMLFTLPGTPVFSYGDEIGLDAAALPGQPMEAPVMLWDESSFPDIPGAVSANMTVKGQSEDPGSLLSLFRRLSDQRSKERSLLHGDFHAFSAGPGLFSYIRHWDQNERFLVVLNFGDVGLSAGLQASDLPASASLPAKADLLLSTQPGREEGSPLELERLKLEPHEGLLLRFPYAAXLQPDMDPLPFSFPSQALWLLIFLFFKNKQTNCCRL

SEQ ID NO: 632 - protein, 181 aa, Homo Sapiens
  misc_feature (133)..(133): Xaa can be any naturally occurring amino acid
MKSSGLFPFLVLLALGTLAPWAVEGSGKSFKAGVCPPKKSAQCLRYKKPECQSDWQCPGKKRCCPDTCGIKCLDPVDTPNPTRRKPGKCPVTYGQCLMLNPPNFCEMDGQCKRDLKCCMGMCGKSCVSPVKAXFLPYGGGSGVLLCVVQVLSTLRLGSTTDILLWGKAWHTAGFQEVPVDQ

SEQ ID NO: 633 - protein, 486 aa, Homo Sapiens
  misc_feature (466)..(466): Xaa can be any naturally occurring amino acid
MNVTSLFSFTSPAVKRLLGWKQGDEEEKWAEKAVDALVKKLKKKKGAMEELEKALSCPGQPSNCVTIPRSLDGRLQVSHRKGLPHVIYCRVWRWPDLQSHHELKPLECCEFPFGSKQKEVCINPYHYKRVESPVLPPVLVPRHSEYNPQHSLLAQFRNLGQNEPHMPLNATFPDSFQQPNSHPFPHSPNSSYPNSPGSSSSTYPHSPTSSDPGSPFQMPADTPPPAYLPPEDPMTQDGSQPMDTNMMAPPLPSEINRGDVQAVAYEEPKHWCSIVYYELNNRVGEAFHASSTSVLVDGFTDPSNNKNRFCLGLLSNVNRNSTIENTRRHIGKGVHLYYVGGEVYAECLSDSSIFVQSRNCNYHHGFHPTTVCKIPSGCSLKIFNNQEFAQLLAQSVNHGFETVYELTKMCTIRMSFVKGWGAEYHRQDVTSTPCWIEIHLHGPLQWLDKVLTQMGSPHNPISSVSXMAPGICLWKTIEPCMYLKDG

SEQ ID NO: 634 - protein, 475 aa, Homo Sapiens
  misc_feature (468)..(468): Xaa can be any naturally occurring amino acid
MSSILPFTPPVVKRLLGWKKSAGGSGGAGGGEQNGQEEKWCEKAVKSLVKKLKKTGRLDELEKAITTQNCNTKCVTIPSTCSEIWGLSTPNTIDQWDTTGLYSFSEQTRSLDGRLQVSHRKGLPHVIYCRLWRWPDLHSHHELKAIENCEYAFNLKKDEVCVNPYHYQRVETPVLPPVLVPRHTEILTELPPLDDYTHSIPENTNFPAGIEPQSNYIPETPPPGYISEDGETSDQQLNQSMDTGSPAELSPTTLSPVNHSLDLQPVTYSEPAFWCSIAYYELNQRVGETFHASQPSLTVDGFTDPSNSERFCLGLLSNVNRNATVEMTRRHIGRGVRLYYIGGEVFAECLSDSAIFVQSPNCNQRYGWHPATVCKIPPGCNLKIFNNQEFAALLAQSVNQGFEAVYQLTRMCTIRMSFVKGWGAEYRRQTVTSTPCWIELHLNGPLQWLDKVLTQMGSPSVRCSSMSXSFTNQVP

SEQ ID NO: 635 - protein, 431 aa, Homo Sapiens
  misc_feature (426)..(426): Xaa can be any naturally occurring amino acid
MSSILPFTPPIVKRLLGWKKGEQNGQEEKWCEKAVKSLVKKLKKTGQLDELEKAITTQNVNTKCITIPRSLDGRLQVSHRKGLPHVIYCRLWRWPDLHSHHELRAMELCEFAFNMKKDEVCVNPYHYQRVETPVLPPVLVPRHTEIPAEFPPLDDYSHSIPENTNFPAGIEPQSNIPETPPPGYLSEDGETSDHQMNHSMDAGSPNLSPNPMSPAHNNLDLQPVTYCEPAFWCSISYYELNQRVGETFHASQPSMTVDGFTDPSNSERFCLGLLSNVNRNAAVELTRRHIGRGVRLYYIGGEVFAECLSDSAIFVQSPNCNQRYGWHPATVCKIPPGCNLKIFNNQEFAALLAQSVNQGFEAVYQLTRMCTIRMSFVKGWGAEYRRQTVTSTPCWIELHLNGPLQWLDKVLTQMGSPSIRCSSVSXRHQVW

SEQ ID NO: 636 - protein, 592 aa, Homo Sapiens
  misc_feature (553)..(553): Xaa can be any naturally occurring amino acid
MDNMSITNTPTSNDACLSIVHSLMCHRQGGESETFAKRAIESLVKKLKEKKDELDSLITAITTNGAHPSKCVTIQRTLDGRLQVAGRKGFPHVIYARLWRWPDLHKNELKHVKYCQYAFDLKCDSVCVNPYHYERVVSPGIDLSGLTLQSNAPSSMMVKDEYVHDFEGQPSLSTEGHSIQTIQHPPSNRASTETYSTPALLAPSESNATSTANFPNIPVASTSQPASILGGSHSEGLLQIASGPQPGQQQNGFTGQPATYHHNSTTTWTGSRTAPYTPNLPHHQNGHLQHHPPMPPHPGHYWPVHNELAFQPPISNHPAPEYWCSIAYFEMDVQVGETFKVPSSCPIVTVDGYVDPSGGDRFCLGQLSNVHRTEAIERARLHIGKGVQLECKGEGDVWVRCLSDHAVFVQSYYLDREAGRAPGDAVHKIYPSAYIKVFDLRQCHRQMQQQAATAQAAAAAQAAAVAGNIPGPGSVGGIAPAISLSAAAGIGVDDLRRLCILRMSFVKGWGPDYPRQSIKETPCWIEIHLHRALQLLDEVLHTMPIADPQPLDXGLLPLGPLTLSGWWTTKYNPVYNLKIYFTFVLLYLFIKG

SEQ ID NO: 637 - protein, 383 aa, Homo Sapiens
  misc_feature (370)..(370): Xaa can be any naturally occurring amino acid
MRCSQCRVAKYCSAKCQKKAWPDHKRECKCLKSCKPRYPPDSVRLLGRVVFKLMDGAPSESEKLYSFYDLESNINKLTEDKKEGLRQLVMTFQHFMREEIQDASQLPPAFDLFEAFAKVICNSFTICNAEMQEVGVGLYPSISLLNHSCDPNCSIVFNGPHLLLRAVRDIEVGEELTICYLDMLMTSEERRKQLRDQYCFECDCFRCQTQDKDADMLTGDEQVWKEVQESLKKIEELKAHWKWEQVLAMCQAIISSNSERLPDINIYQLKVLDCAMDACINLGLLEEALFYGTRTMEPYRIFFPGSHPVRGVQVMKVGKLQLHQGMFPQAMKNLRLAFDIMRVTHGREHSLIEDLILLLEECDANIRASXGNAVRGKYGVCLC

SEQ ID NO: 638 - protein, 235 aa, Homo Sapiens
  misc_feature (223)..(223): Xaa can be any naturally occurring amino acid
MLSRAVCGTSRQLAPVLGYLGSRQKHSLPDLPYDYGALEPHINAQIMQLHHSKHHAAYVNNLNVTEEKYQEALAKGDVTAQIALQPALKFNGGGHINHSIFWTNLSPNGGGEPKGELLEAIKRDFGSFDKFKEKLTAASVGVQGSGWGWLGFNKERGHLQIAACPNQDPLQGTTGLIPLLGIDVWEHAYYLQYKNVRPDYLKAIWNVINWENVTERYMACKKXTTIVMLSMLSSL

SEQ ID NO: 639 - protein, 232 aa, Homo Sapiens
  misc_feature (223)..(223): Xaa can be any naturally occurring amino acid
MLSRAVCGTSRQLAPVLGYLGSRQKHSLPDLPYDYGALEPHINAQIMQLHHSKHHAAYVNNLNVTEEKYQEALAKGDVTAQIALQPALKFNGGGHINHSIFWTNLSPNGGGEPKGELLEAIKRDFGSFDKFKEKLTAASVGVQGSGWGWLGFNKERGHLQIAACPNQDPLQGTTGLIPLLGIDVWEHAYYLQYKNVRPDYLKAIWNVINWENVTERYMACKKXTTIVMLIIP

SEQ ID NO: 640 - protein, 558 aa, Homo Sapiens
  misc_feature (510)..(510): Xaa can be any naturally occurring amino acid
MNLLDPFMKMTDEQEKGLSGAPSPTMSEDSAGSPCPSGSGSDTENTRPQENTFPKGEPDLKKESEEDKFPVCIREAVSQVLKGYDWTLVPMPVRVNGSSKNKPHVKRPMNAFMVWAQAARRKLADQYPHLHNAELSKTLGKLWRLLNESEKRPFVEEAERLRVQHKKDHPDYKYQPRRRKSVKNGQAEAEEATEQTHISPNAIFKALQADSPHSSSGMSEVHSPGEHSGQSQGPPTPPTTPKTDVQPGKADLKREGRPLPEGGRQPPIDFRDVDIGELSSDVISNIETFDVNEFDQYLPPNGHPGVPATHGQVTYTGSYGISSTAATPASAGHVWMSKQQAPPPPPQQPPQAPPAPQAPPQPQAAPPQQPAAPPQQPQAHTLTTLSSEPGQSQRTHIKTEQLSPSHYSEQQQHSPQQIAYSPFNLPHYSPSYPPITRSQYDYTDHQNSSSYYSHAAGQGTGLYSTFTYMNPAQRPMYTPIADTSGVPSIPQTHSPQHWEQPVYTQLTRPXGGLPRRAKMAEMILKITEEREDQPEFPLDICVFLFFYFVLFFLLLLLP

SEQ ID NO: 641 - protein, 820 aa, Homo Sapiens
  misc_feature (786)..(786): Xaa can be any naturally occurring amino acid
MSDQDHSMDEMTAVVKIEKGVGGNNGGNGNGGGAFSQARSSSTGSSSSTGGGGQESQPSPLALLAATCSRIESPNENSNNSQGPSQSGGTGELDLTATQLSQGANGWQIISSSSGATPTSKEQSGSSTNGSNGSESSKNRTVSGGQYVVAAAPNLQNQQVLTGLPGVMPNIQYQVIPQFQTVDGQQLQFAATGAQVQQDGSGQIQIIPGANQQIITNRGSGGNIIAAMPNLLQQAVPLQGLANNVLSGQTQYVTNVPVALNGNITLLPVNSVSAATLTPSSQAVTISSSGSQESGSQPVTSGTTISSASLVSSQASSSSFFTNANSYSTTTTTSNMGIMNFTTSGSSGTNSQGQTPQRVSGLQGSDALNIQQNQTSGGSLQAGQQKEGEQNQQTQQQQILIQPQLVQGGQALQALQAAPLSGQTFTTQAISQETLQNLQLQAVPNSGPIIIRTPTVGPNGQVSWQTLQLQNLQVQNPQAQTITLAPMQGVSLGQTSSSNTTLTPIASAASIPAGTVTVNAAQLSSMPGLQTINLSALGTSGIQVHPIQGLPLAIANAPGDHGAQLGLHGAGGDGIHDDTAGGEEGENSPDAQPQAGRRTRREACTCPYCKDSEGRGSGDPGKKKQHICHIQGCGKVYGKTSHLRAHLRWHTGERPFMCTWSYCGKRFTRSDELQRHKRTHTGEKKFACPECPKRFMRSDHLSKHIKTHQNKKGGPGVALSVGTLPLDSGAGSEGSGTATPSALITTNMVAMEAICPEGIARLANSGINVMQVADLQSINISGNGFXDQAPGARDIWAIPLNPGMQGSMGPRDMEERAMKH

SEQ ID NO: 642 - protein, 84 aa, Homo Sapiens
  misc_feature (80)..(80): Xaa can be any naturally occurring amino acid
MKVTGIFLLSALALLSLSGNTGADSLGREAKCYNELNGCTKIYDPVCGTDGNTYPNECVLCFENRKRQTSILIQKSGPCXEPRF

SEQ ID NO: 643 - protein, 570 aa, Homo Sapiens
  misc_feature (514)..(514): Xaa can be any naturally occurring amino acid
MAPARTMARARLAPAGIPAVALWLLCTLGLQGTQAGPPPAPPGLPAGADCLNSFTAGVPGFVLDTNASVSNGATFLESPTVRRGWDCVRACCTTQNCNLALVELQPDRGEDAIAACFLINCLYEQNFVCKFAPREGFINYLTREVYRSYRQLRTQGFGGSGIPKAWAGIDLKVQPQEPLVLKDVENTDWRLLRGDTDVRVERKDPNQVELWGLKEGTYLFQLTVTSSDHPEDTANVTVTVLSTKQTEDYCLASNKVGRCRGSFPRWYYDPTEQICKSFVYGGCLGNKNNYLREEECILACRGVQGPSMERRHPVCSGTCQPTQFRCSNGCCIDSFLECDDTPNCPDASDEAACEKYTSGFDELQRIHFPSDKGHCVDLPDTGLCKESIPRWYYNPFSEHCARFTYGGCYGNKNNFEEEQQCLESCRGISKKDVFGLRREIPIPSTGSVEMAVAVFLVICIVVVVAILGYCFFKNQRKDFHGHHHHPPPTPASSTVSTTEDTEHLVYNHTTRPLXAWVSPALTWPCFLLAKAEAWAGKNFGTRLLPVSQAHCASETRAPAPLGEVSAKLTS

SEQ ID NO: 644 - protein, 586 aa, Homo Sapiens
  misc_feature (530)..(530): Xaa can be any naturally occurring amino acid
MAPARTMARARLAPAGIPAVALWLLCTLGLQGTQAGPPPAPPGLPAGADCLNSFTAGVPGFVLDTNASVSNGATFLESPTVRRGWDCVRACCTTQNCNLALVELQPDRGEDAIAACFLINCLYEQNFVCKFAPREGFINYLTREVYRSYRQLRTQGFGGSGIPKAWAGIDLKVQPQEPLVLKDVENTDWRLLRGDTDVRVERKDPNQVELWGLKEGTYLFQLTVTSSDHPEDTANVTVTVLSTKQTEDYCLASNKVGRCRGSFPRWYYDPTEQICKSFVYGGCLGNKNNYLREEECILACRGVQGGPLRGSSGAQATFPQGPSMERRHPVCSGTCQPTQFRCSNGCCIDSFLECDDTPNCPDASDEAACEKYTSGFDELQRIHFPSDKGHCVDLPDTGLCKESIPRWYYNPFSEHCARFTYGGCYGNKNNFEEEQQCLESCRGISKKDVFGLRREIPIPSTGSVEMAVAVFLVICIVVVVAILGYCFFKNQRKDFHGHHHHPPPTPASSTVSTTEDTEHLVYNHTTRPLXAWVSPALTWPCFLLAKAEAWAGKNFGTRLLPVSQAHCASETRAPAPLGEVSAKLTS

SEQ ID NO: 645 - protein, 272 aa, Homo Sapiens
  misc_feature (253)..(253): Xaa can be any naturally occurring amino acid
MAQLCGLRRSRAFLALLGSLLLSGVLAADRERSIHDFCLVSKVVGRCRASMPRWWYNVTDGSCQLFVYGGCDGNSNNYLTKEECLKKCATVTENATGDLATSRNAADSSVPSAPRRQDSEDHSSDMFNYEEYCTANAVTGPCRASFPRWYFDVERNSCNNFIYGGCRGNKNSYRSEEACMLRCFRQQENPPLPLGSKVVVLAGLFVMVLILFLGASMVYLIRVARRNQERALRTVWSSGDDKEQLVKNTYVLXPPCRQEDWGREGRLCVSFF

SEQ ID NO: 646 - protein, 312 aa, Homo Sapiens
  misc_feature (301)..(301): Xaa can be any naturally occurring amino acid
MRIAVICFCLLGITCAIPVKQADSGSSEEKQLYNKYPDAVATWLNPDPSQKQNLLAPQTLPSKSNESHDHMDDMDDEDDDDHVDSQDSIDSNDSDDVDDTDDSHQSDESHHSDESDELVTDFPTDLPATEVFTPVVPTVDTYDGRGDSVVYGLRSKSKKFRRPDIQYPDATDEDITSHMESEELNGAYKAIPVAQDLNAPSDWDSRGKDSYETSQLDDQSAETHSHKQSRLYKRKANDESNEHSDVIDSQELSKVSREFHSHEFHSHEDMLVVDPKSKEEDKHLKFRISHELDSASSEVNXKEKKYNFSLCI

SEQ ID NO: 647 - protein, 326 aa, Homo Sapiens
  misc_feature (315)..(315): Xaa can be any naturally occurring amino acid
MRIAVICFCLLGITCAIPVKQADSGSSEEKQLYNKYPDAVATWLNPDPSQKQNLLAPQNAVSSEETNDFKQETLPSKSNESHDHMDDMDDEDDDDHVDSQDSIDSNDSDDVDDTDDSHQSDESHHSDESDELVTDFPTDLPATEVFTPVVPTVDTYDGRGDSVVYGLRSKSKKFRRPDIQYPDATDEDITSHMESEELNGAYKAIPVAQDLNAPSDWDSRGKDSYETSQLDDQSAETHSHKQSRLYKRKANDESNEHSDVIDSQELSKVSREFHSHEFHSHEDMLVVDPKSKEEDKHLKFRISHELDSASSEVNXKEKKYNFSLCI

SEQ ID NO: 648 - protein, 177 aa, Homo Sapiens
  misc_feature (170)..(170): Xaa can be any naturally occurring amino acid
MSSYQQKQTFTPPPQLQQQQVKQPSQPPPQEIFVPTTKEPCHSKVPQPGNTKIPEPGCTKVPEPGCTKVPEPGCTKVPEPGCTKVPEPGCTKVPEPGCTKVPEPGYTKVPEPGSIKVPDQGFIKFPEPGAIKVPEQGYTKVPVPGYTKLPEPCPSTVTPGPAQQKTKQKXFGAQTSP

SEQ ID NO: 649 - protein, 328 aa, Homo Sapiens
  misc_feature (320)..(320): Xaa can be any naturally occurring amino acid
MDPQNQHGSGSSLVVIQQPSLDSRQRLDYEREIQPTAILSLDQIKAIRGSNEYTEGPSVVKRPAPRTAPRQEKHERTHEIIPINVNNNYEHRHTSHLGHAVLPSNARGPILSRSTSTGSAASSGSNSSASSEQGLLGRSPPTRPVPGHRSERAIRTQPKQLIVDDLKGSLKEDLTQHKFICEQCGKCKCGECTAPRTLPSCLACNRQCLCSAESMVEYGTCMCLVKGIFYHCSNDDEGDSYSDNPCSCSQSHCCSRYLCMGAMSLFLPCLLCYPPAKGCLKLCRRCYDWIHRPGCRCKNSNTVYCKLESCPSRGQGKPSXFLEVGCTS

SEQ ID NO: 650 - protein, 596 aa, Homo Sapiens
  misc_feature (537)..(537): Xaa can be any naturally occurring amino acid
MGSNKSKPKDASQRRRSLEPAENVHGAGGGAFPASQTPSKPASADGHRGPSAAFAPAAAEPKLFGGFNSSDTVTSPQRAGPLAGGVTTFVALYDYESRTETDLSFKKGERLQIVNNTEGDWWLAHSLSTGQTGYIPSNYVAPSDSIQAEEWYFGKITRRESERLLLNAENPRGTFLVRESETTKGAYCLSVSDFDNAKGLNVKHYKIRKLDSGGFYITSRTQFNSLQQLVAYYSKHADGLCHRLTTVCPTSKPQTQGLAKDAWEIPRESLRLEVKLGQGCFGEVWMGTWNGTTRVAIKTLKPGTMSPEAFLQEAQVMKKLRHEKLVQLYAVVSEEPIYIVTEYMSKGSLLDFLKGETGKYLRLPQLVDMAAQIASGMAYVERMNYVHRDLRAANILVGENLVCKVADFGLARLIEDNEYTARQGAKFPIKWTAPEAALYGRFTIKSDVWSFGILLTELTTKGRVPYPGMVNREVLDQVERGYRMPCPPECPESLHDLMCQCWRKEPEERPTFEYLQAFLEDYFTSTEPQYQPGENLXAQAGPDRLLGLDPGLGGPCLGACPTLPACCWSSLCGAELPGARPFLFGGMEGASGPRVA

SEQ ID NO: 651 - protein, 264 aa, Homo Sapiens
  misc_feature (260)..(260): Xaa can be any naturally occurring amino acid
MATATGVAEERLLAALAYLQCAVGCAVFARNRQTNSVYGRHALPSHRLRVPARAAWVVQELPSLALPLYQYASESAPRLRSAPNCILLAMFLVHYGHRCLIYPFLMRGGKPMPLLACTMAIMFCTCNGYLQSRYLSHCAVYADDWVTDPRFLIGFGLWLTGMLINIHSDHILRNLRKPGDTGYKIPRGGLFEYVTAANYFGEIMEWCGYALASWSVQGAAFAFFTFCFLSGRAKEHHEWYLRKFEEYPKFRKIIIPFLFXVRFS

SEQ ID NO: 652 - protein, 247 aa, Homo Sapiens
  misc_feature (224)..(224): Xaa can be any naturally occurring amino acid
MNGDDAFARRPTVGAQIPEKIQKAFDDIAKYFSKEEWEKMKASEKIFYVYMKRKYEAMTKLGFKATLPPFMCNKRAEDFQGNDLDNDPNRGNQVERPQMTFGRLQGISPKIMPKKPAEEGNDSEEVPEASGPQNDGKELCPPGKPTTSEKIHERSGNREAQEKEERRGTAHRWSSQNTHNIGRFSLSTSMGAVHGTPKTITHNRDPKGGNMPGPTDCVRENSWXFMKRSATLRKMTSNSPQGYDTCP

SEQ ID NO: 653 - protein, 205 aa, Homo Sapiens; identical to SEQ ID NO: 434
  misc_feature (189)..(189): Xaa can be any naturally occurring amino acid

SEQ ID NO: 654 - protein, 885 aa, Homo Sapiens
  misc_feature (856)..(856): Xaa can be any naturally occurring amino acid
MGSDRARKGGGGPKDFGAGLKYNSRHEKVNGLEEGVEFLPVNNVKKVEKHGPGRWVVLAAVLIGLLLVLLGIGFLVWHLQYRDVRVQKVFNGYMRITNENFVDAYENSNSTEFVSLASKVKDALKLLYSGVPFLGPYHKESAVTAFSEGSVIAYYWSEFSIPQHLVEEAERVMAEERVVMLPPRARSLKSFVVTSVVAFPTDSKTVQRTQDNSCSFGLHARGVELMRFTTPGFPDSPYPAHARCQWALRGDADSVLSLTFRSFDLASCDERGSDLVTVYNTLSPMEPHALVQLCGTYPPSYNLTFHSSQNVLLITLITNTERRHPGFEATFFQLPRMSSCGGRLRKAQGTFNSPYYPGHYPPNIDCTWNIEVPNNQHVKVRFKFFYLLEPGVPAGTCPKDYVEINGEKYCGERSQFVVTSNSNKITVRFHSDQSYTDTGFLAEYLSYDSSDPCPGQFTCRTGRCIRKELRCDGWADCTDHSDELNCSCDAGHQFTCKNKFCKPLFWVCDSVNDCGDNSDEQGCSCPAQTFRCSNGKCLSKSQQCNGKDDCGDGSDEASCPKVNVVTCTKHTYRCLNGLCLSKGNPECDGKEDCSDGSDEKDCDCGLRSFTRQARVVGGTDADEGEWPWQVSLHALGQGHICGASLISPNWLVSAAHCYIDDRGFRYSDPTQWTAFLGLHDQSQRSAPGVQERRLKRIISHPFFNDFTFDYDIALLELEKPAEYSSMVRPICLPDASHVFPAGKAIWVTGWGHTQYGGTGALILQKGEIRVINQTTCENLLPQQITPRMMCVGFLSGGVDSCQGDSGGPLSSVEADGRIFQAGVVSWGDGCAQRNKPGVYTRLPLFRDWIKENTGVXGPGPPKCVHLRGHPSSTPVCTPAGWRLDR

SEQ ID NO: 655 - protein, 496 aa, Homo Sapiens
  misc_feature (446)..(446): Xaa can be any naturally occurring amino acid
MSKLPRELTRDLERSLPAVASLGSSLSHSQSLSSHLLPPPEKRRAISDVRRTFCLFVTFDLLFISLLWIIELNTNTGIRKNLEQEIIQYNFKTSFFDIFVLAFFRFSGLLLGYAVLRLRHWWVIAVTTLVSSAFLIVKVILSELLSKGAFGYLLPIVSFVLAWLETWFLDFKVLPQEAEEERWYLAAQVAVARGPLLFSGALSEGQFYSPPESFAASDNESDEEVAGKKSFSAQEREYIRQGKEATAVVDQILAQEENWKFEKNNEYGDTVYTIEVPFHGKTFILKTFLPCPAELVYQEVILQPERMVLWNKTVTACQILQRVEDNTLISYDVSAGAAGGVVSPRDFVNVRRIERRRDRYLSSGIATSHSAKPPTHKYVRGENGPGGFIVLKSASNPRVCTFVWILNTDLKGRLPRYLIHQSLAATMFEFAFHLRQRISELGARAXLCPLPPCGPGSCRHHFQSQKGCQLGSHCPHGTWPQAVTLHRATQCLELTD

SEQ ID NO: 656 - protein, 753 aa, Homo Sapiens
  misc_feature (749)..(749): Xaa can be any naturally occurring amino acid
MSQWNQVQQLEIKFLEQVDQFYDDNFPMEIRHLLAQWIENQDWEAASNNETMATILLQNLLIQLDEQLGRVSKEKNLLLIHNLKRIRKVLQGKFHGNPMHVAVVISNCLREERRILAAANMPVQGPLEKSLQSSSVSERQRNVEHKVAAIKNSVQMTEQDTKYLEDLQDEFDYRYKTIQTMDQSDKNSAMVNQEVLTLQEMLNSLDFKRKEALSKMTQIIHETDLLMNTMLIEELQDWKRRQQIACIGGPLHNGLDQLQNCFTLLAESLFQLRRQLEKLEEQSTKMTYEGDPIPMQRTHMLERVTFLIYNLFKNSFVVERQPCMPTHPQRPLVLKTLIQFTVKLRLLIKLPELNYQVKVKASIDKNVSTLSNRRFVLCGTNVKAMSIEESSNGSLSVEFRHLQPKEMKSSAGGKGNEGCHMVTEELHSITFETQICLYGLTIDLETSSLPVVMISNVSQLPNAWASIIWYNVSTNDSQNLVFFNNPPPATLSQLLEVMSWQFSSYVGRGLNSDQLHMLAEKLTVQSSYSDGHLTWAKFCKEHLPGKSFTFWTWLEAILDLIKKHILPLWIDGYVMGFVSKEKERLLLKDKMPGTFLLRFSESHLGGITFTWVDHSESGEVRFHSVEPYNKGRLSALPFADILRDYKVIMAENIPENPLKYLYPDIPKDKAFGKHYSSQPCEVSRPTERGDKGYVPSVFIPISTIRSDSTEPHSPSDLLPMSPSVYAVLRENLSPTTIETAMKSPYSAEXQDKL

SEQ ID NO: 657 - protein, 809 aa, Homo Sapiens
  misc_feature (795)..(795): Xaa can be any naturally occurring amino acid
MAGWIQAQQLQGDALRQMQVLYGQHFPIEVRHYLAQWIESQPWDAIDLDNPQDRAQATQLLEGLVQELQKKAEHQVGEDGFLLKIKLGHYATQLQKTYDRCPLELVRCIRHILYNEQRLVREANNCSSPAGILVDAMSQKHLQINQTFEELRLVTQDTENELKKLQQTQEYFIIQYQESLRIQAQFAQLAQLSPQERLSRETALQQKQVSLEAWLQREAQTLQQYRVELAEKHQKTLQLLRKQQTIILDDELIQWKRRQQLAGNGGPPEGSLDVLQSWCEKLAEIIWQNRQQIRRAEHLCQQLPIPGPVEEMLAEVNATITDIISALVTSTFIIEKQPPQVLKTQTKFAATVRLLVGGKLNVHMNPPQVKATIISEQQAKSLLKNENTRNECSGEILNNCCVMEYHQATGTLSAHFRNMSLKRIKRADRRGAESVTEEKFTVLFESQFSVGSNELVFQVKTLSLPVVVIVHGSQDHNATATVLWDNAFAEPGRVPFAVPDKVLWPQLCEALNMKFKAEVQSNRGLTKENLVFLAQKLFNNSSSHLEDYSGLSVSWSQFNRENLPGWNYTFWQWFDGVMEVLKKHHKPHWNDGAILGFVNKQQAHDLLINKPDGTFLLRFSDSEIGGITIAWKFDSPERNLWNLKPFTTRDFSIRSLADRLGDLSYLIYVFPDRPKDEVFSKYYTPVLAKAVDGYVKPQIKQVVPEFVNASADAGGSSATYMDQAPSPAVCPQAPYNMYPQNPDHVLDQDGEFDLDETMDVARHVEELLRRPMDSLDSRLSPPAGLFTSARGSLSXMFESHASLWKQYAM

SEQ ID NO: 658 - protein, 185 aa, Homo Sapiens
  misc_feature (150)..(150): Xaa can be any naturally occurring amino acid
MASSDIQVKELEKRASGQAFELILSPRSKESVPEFPLSPPKKKDLSLEEIQKKLEAAEERRKSHEAEVLKQLAEKREHEKEVLQKAIEENNNFSKMAEEKLTHKMEANKENREAQMAAKLERLREKDKHIEEVRKNKESKDPADETEADXFVLRTDFLPIPFLNIQRLYWPVSFYFFPPDKYFRS

SEQ ID NO: 659 - protein, 358 aa, Homo Sapiens
  misc_feature (351)..(351): Xaa can be any naturally occurring amino acid
MAMRQTPLTCSGHTRPVVDLAFSGITPYGYFLISACKDGKPMLRQGDTGDWIGTFLGHKGAVWGATLNKDATKAATAAADFTAKVWDAVSGDELMTLAHKHIVKTVDFTQDSNYLLTGGQDKLLRIYDLNKPEAEPKEISGHTSGIKKALWCSEDKQILSADDKTVRLWDHATMTEVKSLNFNMSVSSMEYIPEGEILVITYGRSIAFHSAVSLDPIKSFEAPATINSASLHPEKEFLVAGGEDFKLYKYDYNSGEELESYKGHFGPIHCVRFSPDGELYASGSEDGTLRLWQTVVGKTYGLWKCVLPEEDSGELAKPKIGFPETTEEELEEIASENSDCIFPSAPDVKAXASIICCS

SEQ ID NO: 660 - protein, 325 aa, Homo Sapiens
  misc_feature (295)..(295): Xaa can be any naturally occurring amino acid
MNSELDYYEKFEEVHGILMYKDFVKYWDNVEAFQARPDDLVIATYPKSGTTWVSEIVYMIYKEGDVEKCKEDVIFNRIPFLECRKENLMNGVKQLDEMNSPRIVKTHLPPELLPASFWEKDCKIIYLCRNAKDVAVSFYYFFLMVAGHPNPGSFPEFVEKFMQGQVPYGSWYKHVKSWWEKGKSPRVLFLFYEDLKEDIRKEVIKLIHFLERKPSEELVDRIIHHTSFQEMKNNPSTNYTTLPDEIMNQKLSPFMRKGITGDWKNHFTVALNEKFDKHYEQQMKESTLKFRTEIXEGLSLLNISDIKDFFSLFSTFSYFRLLEKT

SEQ ID NO: 661 - protein, 326 aa, Homo Sapiens
  misc_feature (315)..(315): Xaa can be any naturally occurring amino acid
MAPPQVLAFGLLLAAATATFAAAQEECVCENYKLAVNCFVNNNRQCQCTSVGAQNTVICSKLAAKCLVMKAEMNGSKLGRRAKPEGALQNNDGLYDPDCDESGLFKAKQCNGTSTCWCVNTAGVRRTDKDTEITCSERVRTYWIIIELKHKAREKPYDSKSLRTALQKEITTRYQLDPKFITSILYENNVITIDLVQNSSQKTQNDVDIADVAYYFEKDVKGESLFHSKKMDLTVNGEQLDLDPGQTLIYYVDEKAPEFSMQGLKAGVIAVIVVVVIAVVAGIVVLVISRKKRMAKYEKAEIKEMGEMHRELNAXLYNLKIIEEGK

SEQ ID NO: 662 - protein, 206 aa, Homo Sapiens
  misc_feature (202)..(202): Xaa can be any naturally occurring amino acid
MANKGPSYGMSREVQSKIEKKYDEELEERLVEWIIVQCGPDVGRPDRGRLGFQVWLKNGVILSKLVNSLYPDGSKPVKVPENPPSMVFKQMEQVAQFLKAAEDYGVIKTDMFQTVDLFEGKDMAAVQRTLMALGSLAVTKNDGHYRGDPNWFMKKAQEHKREFTESQLQEGKHVIGLQMGSNRGASQAGMTGYGRPRQIISXSGEG

SEQ ID NO: 663 - protein, 2111 aa, Homo Sapiens
  misc_feature (2097)..(2097): Xaa can be any naturally occurring amino acid
MCSTPGMPAPGASLALRVSFVDVHPDVIPVQLWGLVGERRGEYLRLSREIQEAAATRGQWALGSASASPGELCLVQVGLLWHRCRVVSRQAQESRVFLLDEGRTITAGAGSLAPGRREFFNLPSEVLGCVLAGLVPAGCGAGSGEPPQHWPADAVDFLSNLQGKEVHGCVLDVLLLHRLVLLEVPDVFQQMRELGLARRVPDSLFRSLLERYLTAATASVGSGVPVLSRVPLKQKQPGLDYFYPQLQLGVTEAVVITQVCHPHRIHCQLRSVSQEIHRLSESMAQVYRGSTGTGDENSTSATWEEREESPDKPGSPCASCGLDGHWYRALLLETFRPQRCAQVLHVDYGRKELVSCSSLRYLLPEYFRMPVVTYPCALYGLWDGGRGWSRSQVGDLKTLILGKAVNAKIEFYCSFEHVYYVSLYGEDGINLNRVFGVQSCCLADRVLQSQATEEEEPETSQSQSPAEEVDEEISLPALRSIRLKMNAFYDAQVEFVKNPSEFWIRLRKHNVTFSKLMRRMCGFYSSASKLDGVVLKPEPDDLCCVKWKENGYYRAIVTKLDDKSVDVFLVDRGNSENVDWYDVRMLLPQFRQLPILAVKCTLADIWPLGKTWSQEAVSFFKKTVLHKELVIHILDKQDHQYVIEILDESRTGEENISKVIAQAGYAKYQEFETKENILVNAHSPGHVSNHFTTESNKIPFAKTGEGEQKAKRENKTTSVSKALSDTTVVTNGSTELVVQEKVKRASVYFPLMQNCLEIKPGSSSKGELEVGSTVEVRVSYVENPGYFWCQLTRNIQGLKTLMSDIQYYCKNTAAPHQRNTLACLAKRTVNRQWSRALISGIQSVEHVNVTFVDYGDREMVSVKNIYSISEEFLKVKAQAFRCSLYNLIQPVGQNPFVWDVKAIQAFNEFIDNAWQKNLELKCTIFALASINEELFNIVDLLTPFQSACHFLVEKRLARPVKLQKPLESSVQLHSYFYSTHDMKIGSEELVYITHIDDPWTFYCQLARNANILEQLSCSITQLSKVLLNLKTSPLNPGTLCLAKYTDGNWYRGIVIEKEPKKVFFVDFGNIYVVTSDDLLPIPSDAYDVLLLPMQAVRCSLSDIPDHIPEEVVVWFQETILDKSLKALVVAKDPDGTLIIELYGDNIQISASINKKLGLLSYKDRIRKKESEVLCSTTETLEEKNENMKLPCTEYLSKSVGYKLPNKEILEESYKPQINSSYKELKLLQSLTKTNLVTQYQDSVGNKNSQVFPLTTEKKEEISAETPLKTARVEATLSERKIGDSCDKDLPLKFCEFPQKTIMPGFKTTVYVSHINDLSDFYVQLIEDEAEISHLSERLNSVKTRPEYYVGPPLQRGDMICAVFPEDNLWYRAVIKEQQPNDLLSVQFIDYGNVSVVHTNKIGRLDLVNAILPGLCIHCSLQGFEVPDNKNSKKMMHYFSQRTSEAAIRCEFVKFQDRWEVILADEHGIIADDMISRYALSEKSQVELSTQVIKSASSKSVNKSDIDTSVFLNWYNPEKKMIRAYATVIDGPEYFWCQFADTEKLQCLEVEVQTAGEQVADRRNCIPCPYIGDPCIVRYREDGHYYRALITNICEDYLVSVRLVDFGNIEDCVDPKALWAIPSELLSVPMQAFPCCLSGFNISEGLCSQEGNDYFYEIITEDVLEITILEIRRDVCDIPLAIVDLKSKGKSINEKMEKYSKTGIKSALPYENIDSEIKQTLGSYNLDVGLKKLSNKAVQNKIYMEQQTDELAEITEKDVNIIGTKPSNFRDPKTDNICEGFENPCKDKIDTEELEGELECHLVDKAEFDDKYLITGFNTLLPHANETKEILELNSLEVPLSPDDESKEFLELESIELQNSLVVDEEKGELSPVPPNVPLSQECVTKGAMELFTLQLPLSCEAEKQPELELPTAQLPLDDKMDPLSLGVSQKAQESMCTEDMRKSSCVESFDDQRRMSLHLHGADCDPKTQNEMNICEEEFVEYKNRDAISALMPLFSEEESSDGSKHNNGLPDHISAQLQNTYTLKAFTVGSKCVVWSSLRNTWSKCEILETAEEGTRVLNLSNGMEEIVNPENVWNGIPKLDKSPPEKRGLEVMEIXPWIYSCGQSVRSCP

SEQ ID NO: 664 - protein, 1171 aa, Homo Sapiens
  misc_feature (1133)..(1133): Xaa can be any naturally occurring amino acid
MPRAPRCRAVRSLLRSHYREVLPLATFVRRLGPQGWRLVQRGDPAAFRALVAQCLVCVPWDARPPPAAPSFRQVSCLKELVARVLQRLCERGAKNVLAFGFALLDGARGGPPEAFTTSVRSYLPNTVTDALRGSGAWGLLLRRVGDDVLVHLLARCALFVLVAPSCAYQVCGPPLYQLGAATQARPPPHASGPRRRLGCERAWNHSVREAGVPLGLPAPGARRRGGSASRSLPLPKRPRRGAAPEPERTPVGQGSWAHPGRTRGPSDRGFCVVSPARPAEEATSLEGALSGTRHSHPSVGRQHHAGPPSTSRPPRPWDTPCPPVYAETKHFLYSSGDKEQLRPSFLLSSLRPSLTGARRLVETIFLGSRPWMPGTPRRLPRLPQRYWQMRPLFLELLGNHAQCPYGVLLKTHCPLRAAVTPAAGVCAREKPQGSVAAPEEEDTDPRRLVQLLRQHSSPWQVYGFVRACLRRLVPPGLWGSRHNERRFLRNTKKFISLGKHAKLSLQELTWKMSVRDCAWLRRSPGVGCVPAAEHRLREEILAKFLHWLMSVYVVELLRSFFYVTETTFQKNRLFFYRKSVWSKLQSIGIRQHLKRVQLRELSEAEVRQHREARPALLTSRLRFIPKPDGLRPIVNMDYVVGARTFRREKRAERLTSRVKALFSVLNYERARRPGLLGASVLGLDDIHRAWRTFVLRVRAQDPPPELYFVKVDVTGAYDTIPQDRLTEVIASIIKPQNTYCVRRYAVVQKAAHGHVRKAFKSHVSTLTDLQPYMRQFVAHLQETSPLRDAVVIEQSSSLNEASSGLFDVFLRFMCHHAVRIRGKSYVQCQGIPQGSILSTLLCSLCYGDMENKLFAGIRRDGLLLRLVDDFLLVTPHLTHAKTFLRTLVRGVPEYGCVVNLRKTVVNFPVEDEALGGTAFVQMPAHGLFPWCGLLLDTRTLEVQSDYSSYARTSIRASLTFNRGFKAGRNMRRKLFGVLRLKCHSLFLDLQVNSLQTVCTNIYKILLLQAYRFHACVLQLPFHQQVWKNPTFFLRVISDTASLCYSILKAKNAGMSLGAKGAAGPLPSEAVQWLCHQAFLLKLTRHRVTYVPLLGSLRTAQTQLSRKLPGTTLTALEAAANPALPSDFKTILDXWPPAHSQAESRHQQPCHAGLYVPGREGRPTPRPAPLGV

SEQ ID NO: 665 - protein, 506 aa, Homo Sapiens
  misc_feature (461)..(461): Xaa can be any naturally occurring amino acid
MHSPPRDQAAIMLWKLVENVKYEDIYEDRHDGVPSHSSRLSQLGSVSQGPYSSAPPLSHTPSSDFQPPYFPPPYQPLPYHQSQDPYSHVNDPYSLNPLHQPQQHPWGQRQRQEVGSEAGSLLPQPRAALPQLSGLDPRRDYHSVRRPDVLLHSAHHGLDAGMGDSLSLHGLGHPGMEDVQSVEDANNSGMNLLDQSVIKKVPVPPKSVTSLMMNKDGFLGGMSVNTGEVFCSVPGRLSLLSSTSKYKVTVGEVQRRLSPPECLNASLLGGVLRRAKSKNGGRSLRERLEKIGLNLPAGRRKAANVTLLTSLVEGEAVHLARDFGYICETEFPAKAVSEYLNRQHTDPSDLHSRKNMLLATKQLCKEFTDLLAQDRTPIGNSRPSPILEPGIQSCLTHFSLITHGFGAPAICAALTALQNYLTEALKGMDKMFLNNTTTNRHTSGEGPGSKTGDKEEKHRKXKIFKKRRKNVLNTKGKTDKNLILALKYWIGFGRIILGRIHIQSKF

SEQ ID NO: 666 - protein, 431 aa, Homo Sapiens
  misc_feature (411)..(411): Xaa can be any naturally occurring amino acid
MAKDAGLIEANGELKVFIDQNLSPGKGVVSLVAVHPSTVNPLGKQLLPKTFGQSNVNIAQQVVIGTPQRPAASNTLVVGSPHTPSTHFASQNQPSDSSPWSAGKRNRKGEKNGKGLRHFSMKVCEKVQRKGTTSYNEVADELVAEFSAADNHILPNESAYDQKNIRRRVYDALNVLMAMNIISKEKKEIKWIGLPTNSAQECQNLEVERQRRLERIKQKQSQLQELILQQIAFKNLVQRNRHAEQQASRPPPPNSVIHLPFIIVNTSKKTVIDCSISNDKFEYLFNFDNTFEIHDDIEVLKRMGMACGLESGSCSAEDLKMARSLVPKALEPYVTEMAQGTVGGVFITTAGSTSNGTRFSASDLTNGADGMLATSSNGSQYSGSRVETPVSYVGEDDEEDDDFNENDEDDXRPPHFRFGFRKTFSEKKLFF

SEQ ID NO: 667 - protein, 104 aa, Homo Sapiens
  misc_feature (85)..(85): Xaa can be any naturally occurring amino acid
MATMENKVICALVLVSMLALGTLAEAQTETCTVAPRERQNCGFPGVTPSQCANKGCCFDDTVRGVPWCFYPNTIDVPPEEECEFXTLLQGSACILTRCRPQHGD

SEQ ID NO: 668 - protein, 181 aa, Homo Sapiens
  misc_feature (130)..(130): Xaa can be any naturally occurring amino acid
MGRRDAQLLAALLVLGLCALAGSEKPSPCQCSRLSPHNRTNCGFPGITSDQCFDNGCCFDSSVTGVPWCFHPLPKQESDQCVMEVSDRRNCGYPGISPEECASRKCCFSNFIFEVPWCFFPKSVEDCHYXERLVPEDASGSPGVPKPKKKLRLISFILHEILGFLNHLFLIFNGLTYNFFK

SEQ ID NO: 669 - protein, 176 aa, Homo Sapiens
  misc_feature (161)..(161): Xaa can be any naturally occurring amino acid
MVPSAGQLALFALGIVLAACQALENSTSPLSADPPVAAAVVSHFNDCPDSHTQFCFHGTCRFLVQEDKPACVCHSGYVGARCEHADLLAVVAASQKKQAITALVVVSIVALAVLIITCVLIHCCQVRKHCEWCRALICRHEKPSALLKGRTACCHSETVVXRAQRRSLARWTVADQ

SEQ ID NO: 670 - protein, 453 aa, Homo Sapiens
  misc_feature (415)..(415): Xaa can be any naturally occurring amino acid
MHYCVLSAFLILHLVTVALSLSTCSTLDMDQFMRKRIEAIRGQILSKLKLTSPPEDYPEPEEVPPEVISIYNSTRDLLQEKASRRAAACERERSDEEYYAKEVYKIDMPPFFPSENAIPPTFYRPYFRIVRFDVSAMEKNASNLVKAEFRVFRLQNPKARVPEQRIELYQILKSKDLTSPTQRYIDSKVVKTRAEGEWLSFDVTDAVHEWLHHKDRNLGFKISLHCPCCTFVPSNNYIIPNKSEELEARFAGIDGTSTYTSGDQKTIKSTRKKNSGKTPHLLLMLLPSYRLESQQTNRRKKRALDAAYCFRNVQDNCCLRPLYIDFKRDLGWKWIHEPKGYNANFCAGACPYLWSSDTQHSRVLSLYNTINPEASASPCCVSQDLEPLTILYYIGKTPKIEQLSNMIVKSCKCSXNSWKSGKTKMTMMMIMMMTTTTMMLVTRKHKRALVHQC

SEQ ID NO: 671 - protein, 428 aa, Homo Sapiens
  misc_feature (413)..(413): Xaa can be any naturally occurring amino acid
MKMHLQRALVVLALLNFATVSLSLSTCTTLDFGHIKKKRVEAIRGQILSKLRLTSPPEPTVMTHVPYQVLALYNSTRELLEEMHGEREEGCTQENTESEYYAKEIHKFDMIQGLAEHNELAVCPKGITSKVFRFNVSSVEKNRTNLFRAEFRVLRVPNPSSKRNEQRIELFQILRPDEHIAKQRYIGGKNLPTRGTAEWLSFDVTDTVREWLLRRESNLGLEISIHCPCHTFQPNGDILENIHEVMEIKFKGVDNEDDHGRGDLGRLKKQKDHHNPHLILMMIPPHRLDNPGQGGQRKKRALDTNYCFRNLEENCCVRPLYIDFRQDLGWKWVHEPKGYYANFCSGPCPYLRSADTTHSTVLGLYNTLNPEASASPCCVPQDLEPLTILYYVGRTPKVEQLSNMVVKSCKCSXDPTCDRERGERTTTA

SEQ ID NO: 672 - protein, 896 aa, Homo Sapiens
  misc_feature (852)..(852): Xaa can be any naturally occurring amino acid
MTSHYVIAIFALMSSCLATAGPEPGALCELSPVSASHPVQALMESFTVLSGCASRGTTGLPQEVHVLNLRTAGQGPGQLQREVTLHLNPISSVHIHHKSVVFLLNSPHPLVWHLKTERLATGVSRLFLVSEGSVVQFSSANFSLTAETEERNFPHGNEHLLNWARKEYGAVTSFTELKIARNIYIKVGEDQVFPPKCNIGKNFLSLNYLAEYLQPKAAEGCVMSSQPQNEEVHIIELITPNSNPYSAFQVDITIDIRPSQEDLEVVKNLILILKCKKSVNWVIKSFDVKGSLKIIAPNSIGFGKESERSMTMTKSIRDDIPSTQGNLVKWALDNGYSPITSYTMAPVANRFHLRLENNAEEMGDEEVHTIPPELRILLDPGALPALQNPPIRGGEGQNGGLPFPFPDISRRVWNEEGEDGLPRPKDPVIPSIQLFPGLREPEEVQGSVDIALSVKCDNEKMIVAVEKDSFQASGYSGMDVTLLDPTCKAKMNGTHFVLESPLNGCGTRPRWSALDGVVYYNSIVIQVPALGDSSGWPDGYEDLESGDNGFPGDMDEGDASLFTRPEIVVFNCSLQQVRNPSSFQEQPHGNITFNMELYNTDLFLVPSQGVFSVPENGHVYVEVSVTKAEQELGFAIQTCFISPYSNPDRMSHYTIIENICPKDESVKFYSPKRVHFPIPQADMDKKRFSFVFKPVFNTSLLFLQCELTLCTKMEKHPQKLPKCVPPDEACTSLDASIIWAMMQNKKTFTKPLAVIHHEAESKEKGPSMKEPNPISPPIFHGLDTLTVMGIAFAAFVIGALLTGALWYIYSHTGETAGRQQVPTSPPASENSSAAHSIGSTQSTPCSSSSTAXPNPAQPGPTQPSPAQLSYCQGQDQWLSLVSRLRGLDFGSLVKTE

SEQ ID NO: 673 - protein, 694 aa, Homo Sapiens
  misc_feature (685)..(685): Xaa can be any naturally occurring amino acid
MMDASKELQVLHIDFLNQDNAVSHHTWEFQTSSPVFRRGQVFHLRLVLNQPLQSYHQLKLEFSTGPNPSIAKHTLVVLDPRTPSDHYNWQATLQNESGKEVTVAVTSSPNAILGKYQLNVKTGNHILKSEENILYLLFNPWCKEDMVFMPDEDERKEYILNDTGCHYVGAARSIKCKPWNFGQFEKNVLDCCISLLTESSLKPTDRRDPVLVCRAMCAMMSFEKGQGVLIGNWTGDYEGGTAPYKWTGSAPILQQYYNTKQAVCFGQCWVFAGILTTVLRALGIPARSVTGFDSAHDTERNLTVDTYVNENGEKITSMTHDSVWNFHVWTDAWMKRPDLPKGYDGWQAVDATPQERSQGVFCCGPSPLTAIRKGDIFIVYDTRFVFSEVNGDRLIWLVKMVNGQEELHVISMETTSIGKNISTKAVGQDRRRDITYEYKYPEGSSEERQVMDHAFLLLSSEREHRRPVKENFLHMSVQSDDVLLGNSVNFTVILKRKTAALQNVNILGSFELQLYTGKKMAKLCDLNKTSQIQGQVSEVTLTLDSKTYINSLAILDDEPVIRGFIIAEIVESKEIMASEVFTSFQYPEFSIELPNTGRIGQLLVCNCIFKNTLAIPLTDVKFSLESLGISSLQTSDHGTVQPGETIQSQIKCTPIKTGPKKFIVKLSSKQVKEINAQKIVLITKXPCLMLWSLS

SEQ ID NO: 674 - protein, 743 aa, Homo Sapiens
  misc_feature (711)..(711): Xaa can be any naturally occurring amino acid
MDQVATLRLESVDLQSSRNNKEHHTQEMGVKRLTVRRGQPFYLRLSFSRPFQSQNDHITFVAETGPKPSELLGTRATFFLTRVQPGNVWSASDFTIDSNSLQVSLFTPANAVIGHYTLKIEISQGQGHSVTYPLGTFILLFNPWSPEDDVYLPSEILLQEYIMRDYGFVYKGHERFITSWPWNYGQFEEDIIDICFEILNKSLYHLKNPAKDCSQRNDVVYVCRVVSAMINSNDDNGVLQGNWGEDYSKGVSPLEWKGSVAILQQWSARGGQPVKYGQCWVFASVMCTVMRCLGVPTRVVSNFRSAHNVDRNLTIDTYYDRNAEMLSTQKRDKIWNFHVWNECWMIRKDLPPGYNGWQVLDPTPQQTSSGLFCCGPASVKAIREGDVHLAYDTPFVYAEVNADEVIWLLGDGQAQEILAHNTSSIGKEISTKMVGSDQRQSITSSYKYPEGSPEERAVFMKASRKMLGPQRASLPFLDLLESGGLRDQPAQLQLHLARIPEWGQDLQLLLRIQRVPDSTHPRGPIGLVVRFCAQALLHGGGTQKPFWRHTVRMNLDFGKETQWPLLLPYSNYRNKLTDEKLIRVSGIAEVEETGRSMLVLKDICLEPPHLSIEVSERAEVGKALRVHVTLTNTLMVALSSCTMVLEGSGLINGQIAKDLGTLVAGHTLQIQLDLYPTKAGPRQLQVLISSNEVKEIKGYKDIFVTVAGAPXDPPSSCPPWHPCPTWLLSTPGYVVLAPPLSSL

SEQ ID NO: 675 - protein, 613 aa, Homo Sapiens
  misc_feature (491)..(491): Xaa can be any naturally occurring amino acid
MEQKPSKVECGSDPEENSARSPDGKRKRKNGQCSLKTSMSGYIPSYLDKDEQCVVCGDKATGYHYRCITCEGCKGFFRRTIQKNLHPTYSCKYDSCCVIDKITRNQCQLCRFKKCIAVGMAMDLVLDDSKRVAKRKLIEQNRERRRKEEMIRSLQQRPEPTPEEWDLIHIATEAHRSTNAQGSHWKQRRKFLPDDIGQSPIVSMPDGDKVDLEAFSEFTKIITPAITRVVDFAKKLPMFSELPCEDQIILLKGCCMEIMSLRAAVRYDPESDTLTLSGEMAVKREQLKNGGLGVVSDAIFELGKSLSAFNLDDTEVALLQAVLLMSTDRSGLLCVDKIEKSQEAYLLAFEHYVNHRKHNIPHFWPKLLMKEREVQSSILYKGAAAEGRPGGSLGVHPEGQQLLGMHVVQGPQVRQLEQQLGEAGSLQGPVLQHQSPKSPQQRLLELLHRSGILHARAVCGEDDSSEADSPSSSEEEPEVCEDLAGNAASPXSPPEGRWGRRRSAIPSPRPLPQEQEVPESWERGLSRAGHLPSRKTTFPSSAGQTWPDSLAFCCVVPSAWDALPPFSAWQHLTCPLRPQLKCHLLPQLPQAEIVVCASLVHASTVTLISLFYN

SEQ ID NO: 676 - protein, 517 aa, Homo Sapiens
  misc_feature (411)..(411): Xaa can be any naturally occurring amino acid
MEQKPSKVECGSDPEENSARSPDGKRKRKNGQCSLKTSMSGYIPSYLDKDEQCVVCGDKATGYHYRCITCEGCKGFFRRTIQKNLHPTYSCKYDSCCVIDKITRNQCQLCRFKKCIAVGMAMDLVLDDSKRVAKRKLIEQNRERRRKEEMIRSLQQRPEPTPEEWDLIHIATEAHRSTNAQGSHWKQRRKFLPDDIGQSPIVSMPDGDKVDLEAFSEFTKIITPAITRVVDFAKKLPMFSELPCEDQIILLKGCCMEIMSLRAAVRYDPESDTLTLSGEMAVKREQLKNGGLGVVSDAIFELGKSLSAFNLDDTEVALLQAVLLMSTDRSGLLCVDKIEKSQEAYLLAFEHYVNHRKHNIPHFWPKLLMKVTDLRMIGACHASRFLHMKVECPTELFPPLFLEVFEDQEVXSLRRPEGVRSWWGGAWREGAELGAEGDPPTPLLSFLSSLDRFSSHTHTRTAQVPPQTSSPGTGQTTELAMERTVWEAGGAVSCSSQDPILSEGRGRAGGLRRDKPP

SEQ ID NO: 677 - protein, 510 aa, Homo Sapiens
  misc_feature (462)..(462): Xaa can be any naturally occurring amino acid
MTPNSMTENGLTAWDKPKHCPDREHDWKLVGMSEACLHRKSHSERRSTLKNEQSSPHLIQTTWTSSIFHLDHDDVNDQSVSSAQTFQTEEKKCKGYIPSYLDKDELCVVCGDKATGYHYRCITCEGCKGFFRRTIQKNLHPSYSCKYEGKCVIDKVTRNQCQECRFKKCIYVGMATDLVLDDSKRLAKRKLIEENREKRRREELQKSIGHKPEPTDEEWELIKTVTEAHVATNAQGSHWKQKRKFLPEDIGQAPIVNAPEGGKVDLEAFSHFTKIITPAITRVVDFAKKLPMFCELPCEDQIILLKGCCMEIMSLRAAVRYDPESETLTLNGEMAVTRGQLKNGGLGVVSDAIFDLGMSLSSFNLDDTEVALLQAVLLMSSDRPGLACVERIEKYQDSFLLAFEHYINYRKHHVTHFWPKLLMKVTDLRMIGACHASRFLHMKVECPTELFPPLFLEVFEDXTDWIHSHNSYSTTGCHFIPLPSSFLFVSLCWEGLFGREKGSSPWHRHG

SEQ ID NO: 678 - protein, 1167 aa, Homo Sapiens
  misc_feature (1139)..(1139): Xaa can be any naturally occurring amino acid
MVWRVPPFLLPILFLASHVGAAVDLTLLANLRLTDPQRFFLTCVSGEAGAGRGSDAWGPPLLLEKDDRIVRTPPGPPLRLARNGSHQVTLRGFSKPSDLVGVFSCVGGAGARRTRVIYVHNSPGAHLLPDKVTHTVNKGDTAVLSARVHKEKQTDVIWKSNGSYFYTLDWHEAQDGRFLLQLPNVQPPSSGIYSATYLEASPLGSAFFRLIVRGCGAGRWGPGCTKECPGCLHGGVCHDHDGECVCPPGFTGTRCEQACREGRFGQSCQEQCPGISGCRGLTFCLPDPYGCSCGSGWRGSQCQEACAPGHFGADCRLQCQCQNGGTCDRFSGCVCPSGWHGVHCEKSDRIPQILNMASELEFNLETMPRINCAAAGNPFPVRGSIELRKPDGTVLLSTKAIVEPEKTTAEFEVPRLVLADSGFWECRVSTSGGQDSRRFKVNVKVPPVPLAAPRLLTKQSRQLVVSPLVSFSGDGPISTVRLHYRPQDSTMDWSTIVVDPSENVTLMNLRPKTGYSVRVQLSRPGEGGEGAWGPPTLMTTDCPEPLLQPWLEGWHVEGTDRLRVSWSLPLVPGPLVGDGFLLRLWDGTRGQERRENVSSPQARTALLTGLTPGTHYQLDVQLYHCTLLGPASPPAHVLLPPSGPPAPRHLHAQALSDSEIQLTWKHPEALPGPISKYVVEVQVAGGAGDPLWIDVDRPEETSTIIRGLNASTRYLFRMRASIQGLGDWSNTVEESTLGNGLQAEGPVQESRAAEEGLDQQLILAVVGSVSATCLTILAALLTLVCIRRSCLHRRRTFTYQSGSGEETILQFSSGTLTLTRRPKLQPEPLSYPVLEWEDITFEDLIGEGNFGQVIRAMIKKDGLKMNAAIKMLKEYASENDHRDFAGELEVLCKLGHHPNIINLLGACKNRGYLYIAIEYAPYGNLLDFLRKSRVLETDPAFAREHGTASTLSSRQLLRFASDAANGMQYLSEKQFIHRDLAARNVLVGENLASKIADFGLSRGEEVYVKKTMGRLPVRWMAIESLNYSVYTTKSDVWSFGVLLWEIVSLGGTPYCGMTCAELYEKLPQGYRMEQPRNCDDEVYELMRQCWRDRPYERPPFAQIALQLGRMLEARKAYVNMSLFENFTYAGIDATAEEAXAAIQPERGSAGRSKLCCLTCDQSDPYSL

SEQ ID NO: 679 - protein, 236 aa, Homo Sapiens
  misc_feature (212)..(212): Xaa can be any naturally occurring amino acid
MTPWLGLIVLLGSWSLGDWGAEACTCSPSHPQDAFCNSDIVIRAKVVGKKLVKEGPFGTLVYTIKQMKMYRGFTKMPHVQYIHTEASESLCGLKLEVNKYQYLLTGRVYDGKMYTGLCNFVERWDQLTLSQRKGLNYRYHLGCNCKIKSCYYLPCFVTSKNECLWTDMLSNFGYPGYQSKHYACIRQKGGYCSWYRGWAPPDKSIINATDPXAPDPAPPHFPPFPLSFPWTLTLPR

SEQ ID NO: 680 - protein, 298 aa, Homo Sapiens
  misc_feature (288)..(288): Xaa can be any naturally occurring amino acid
MHRLMGVNSTAAAAAGQPNVSCTCNCKRSLFQSMEITELEFVQIIIIVVVMMVMVVVITCLLSHYKLSARSFISRHSQGRRREDALSSEGCLWPSESTVSGNGIPEPQVYAPPRPTDRLAVPPFAQRERFHRFQPTYPYLQHEIDLPPTISLSDGEEPPPYQGPCTLQLRDPEQQLELNRESVRAPPNRTIFDSDLMDSARLGGPCPPSSNSGISATCYGSGGRMEGPPPTYSEVIGHYPGSSFQHQQSSGPPSLLEGTRLHHTHIAPLESAAIWSKEKDKQKGHPLXGPQGGRAGAA

SEQ ID NO: 681 - protein, 263 aa, Homo Sapiens
  misc_feature (253)..(253): Xaa can be any naturally occurring amino acid
MAELEFVQIIIIVVVMMVMVVVITCLLSHYKLSARSFISRHSQGRRREDALSSEGCLWPSESTVSGNGIPEPQVYAPPRPTDRLAVPPFAQRERFHRFQPTYPYLQHEIDLPPTISLSDGEEPPPYQGPCTLQLRDPEQQLELNRESVRAPPNRTIFDSDLMDSARLGGPCPPSSNSGISATCYGSGGRMEGPPPTYSEVIGHYPGSSFQHQQSSGPPSLLEGTRLHHTHIAPLESAAIWSKEKDKQKGHPLXGPQGGRAGAA

SEQ ID NO: 682 - protein, 463 aa, Homo Sapiens
  misc_feature (455)..(455): Xaa can be any naturally occurring amino acid
MGENDPPAVEAPFSFRSLFGLDDLKISPVAPDADAVAAQILSLLPLKFFPIIVIGIIALILALAIGLGIHFDCSGKYRCRSSFKCIELIARCDGVSDCKDGEDEYRCVRVGGQNAVLQVFTAASWKTMCSDDWKGHYANVACAQLGFPSYVSSDNLRVSSLEGQFREEFVSIDHLLPDDKVTALHHSVYVREGCASGHVVTLQCTACGHRRGYSSRIVGGNMSLLSQWPWQASLQFQGYHLCGGSVITPLWIITAAHCVYDLYLPKSWTIQVGLVSLLDNPAPSHLVEKIVYHSKYKPKRLGNDIALMKLAGPLTFNEMIQPVCLPNSEENFPDGKVCWTSGWGATEDGAGDASPVLNHAAVPLISNKICNHRDVYGGIISPSMLCAGYLTGGVDSCQGDSGGPLVCQERRLWKLVGATSFGIGCAEVNKPGVYTRVTSFLDWIHEQMERDLKTXRGRGQVAT

SEQ ID NO: 683 - protein, 336 aa, Homo Sapiens
  misc_feature (328)..(328): Xaa can be any naturally occurring amino acid
MCSDDWKGHYANVACAQLGFPSYVSSDNLRVSSLEGQFREEFVSIDHLLPDDKVTALHHSVYVREGCASGHVVTLQCTACGHRRGYSSRIVGGNMSLLSQWPWQASLQFQGYHLCGGSVITPLWIITAAHCVYDLYLPKSWTIQVGLVSLLDNPAPSHLVEKIVYHSKYKPKRLGNDIALMKLAGPLTFNEMIQPVCLPNSEENFPDGKVCWTSGWGATEDGAGDASPVLNHAAVPLISNKICNHRDVYGGIISPSMLCAGYLTGGVDSCQGDSGGPLVCQERRLWKLVGATSFGIGCAEVNKPGVYTRVTSFLDWIHEQMERDLKTXRGRGQVAT

SEQ ID NO: 684 - protein, 374 aa, Homo Sapiens
  misc_feature (345)..(345): Xaa can be any naturally occurring amino acid
MGENDPPAVEAPFSFRSLFGLDDLKISPVAPDADAVAAQILSLLPLKFFPIIVIGIIALILALAIGLGIHFDCSGKYRCRSSFKCIELIARCDGVSDCKDGEDEYRCVRVGGQNAVLQVFTAASWKTMCSDDWKGHYANVACAQLGFPSYVSSDNLRVSSLEGQFREEFVSIDHLLPDDKVTALHHSVYVREGCASGHVVTLQCTACGHRRGYSSRIVGGNMSLLSQWPWQASLQFQGYHLCGGSVITPLWIITAAHCVYDLYLPKSWTIQVGLVSLLDNPAPSHLVEKIVYHSKYKPKRLGNDIALMKLAGPLTFNGTSGSLCGSAALPLFQEDLQLLIEAFLXWLLYNPCQILIIPTPDSCWCWHQLIIFSH

SEQ ID NO: 685 - protein, 739 aa, Homo Sapiens
  misc_feature (655)..(655): Xaa can be any naturally occurring amino acid
MSEASSEDLVPPLEAGAAPYREEEEAAKKKKEKKKKSKGLANVFCVFTKGKKKKGQPSSAEPEDAAGSRQGLDGPPPTVEELKAALERGQLEAARPLLALERELAAAAAAGGVSEEELVRRQSKVEALYELLRDQVLGVLRRPLEAPPERLRQALAVVAEQEREDRQAAAAGPGTSGLAATRPRRWLQLWRRGVAEAAEERMGQRPAAGAEVPESVFLHLGRTMKEDLEAVVERLKPLFPAEFGVVAAYAESYHQHFAAHLAAVAQFELCERDTYMLLLWVQNLYPNDIINSPKLVGELQGMGLGSLLPPRQIRLLEATFLSSEAANVRELMDRALELEARRWAEDVPPQRLDGHCHSELAIDIIQITSQAQAKAESITLDLGSQIKRVLLVELPAFLRSYQRAFNEFLERGKQLTNYRANVIANINNCLSFRMSMEQNWQVPQDTLSLLLGPLGELKSHGFDTLLQNLHEDLKPLFKRFTHTRWAAPVETLENIIATVDTRLPEFSELQGCFREELMEALHLHLVKEYIIQLSKGRLVLKTAEQQQQLAGYILANADTIQHFCTQHGSPATWLQPALPTLAEIIRLQDPSAIKIEVATYATCYPDFSKGHLSAILAIKGNLSNSEVKRIRSILDVSMGAQEPSRPLFSLIKVGXLFLWPDLPVSAQQALGTPRWELLRAALVLGSSRVSCALMLLLPSPGGGAGPVSWNWTDLGLFTCPMGAGAPILGSQPGNTKDSL

SEQ ID NO: 686 - protein, 861 aa, Homo Sapiens
  misc_feature (791)..(791): Xaa can be any naturally occurring amino acid
MAEQVLPQALYLSNMRKAVKIRERTPEDIFKPTNGIIHHFKTMHRYTLEMFRTCQFCPQFREIIHKALIDRNIQATLESQKKLNWCREVRKLVALKTNGDGNCLMHATSQYMWGVQDTDLVLRKALFSTLKETDTRNFKFRWQLESLKSQEFVETGLCYDTRNWNDEWDNLIKMASTDTPMARSGLQYNSLEEIHIFVLCNILRRPIIVISDKMLRSLESGSNFAPLKVGGIYLPLHWPAQECYRYPIVLGYDSHHFVPLVTLKDSGPEIRAVPLVNRDRGRFEDLKVHFLTDPENEMKEKLLKEYLMVIEIPVQGWDHGTTHLINAAKLDEANLPKEINLVDDYFELVQHEYKKWQENSEQGRREGHAQNPMEPSVPQLSLMDVKCETPNCPFFMSVNTQPLCHECSERRQKNQNKLPKLNSKPGPEGLPGMALGASRGEAYEPLAWNPEESTGGPHSAPPTAPSPFLFSETTAMKCRSPGCPFTLNVQHNGFCERCHNARQLHASHAPDHTRHLDPGKCQACLQDVTRTFNGICSTCFKRTTAEASSSLSTSLPPSCHQRSKSDPSRLVRSPSPHSCHRAGNDAPAGCLSQAARTPGDRTGTSKCRKAGCVYFGTPENKGFCTLCFIEYRENKHFAAASGKVSPTASRFQNTIPCLGRECGTLGSTMFEGYCQKCFIEAQNQRFHEAKRTEEQLRSSQRRDVPRTTQSTSRPKCARASCKNILACRSEELCMECQHPNQRMGPGAHRGEPAPEDPPKQRCRAPACDHFGNAKCNGYCNECFQFKQMYGXPETGGSPPARSGASSCQSSWCYPLNPSAATATVGLRVSEQERKDKLFVVPTMLRFGNPGVFPGGLRKQSL

SEQ ID NO: 687 - protein, 483 aa, Homo Sapiens
  misc_feature (469)..(469): Xaa can be any naturally occurring amino acid
MAPPPARVHLGAFLAVTPNPGSAASGTEAAAATPSKVWGSSAGRIEPRGGGRGALPTSMGQHGPSARARAGRAPGPRPAREASPRLRVHKTFKFVVVGVLLQVVPSSAATIKLHDQSIGTQQWEHSPLGELCPPGSHRSEHPGACNRCTEGVGYTNASNNLFACLPCTACKSDEEERSPCTTTRNTACQCKPGTFRNDNSAEMCRKCSRGCPRGMVKVKDCTPWSDIECVHKESGNGHNIWVILVVTLVVPLLLVAVLIVCCCIGSGCGGDPKCMDRVCFWRLGLLRGPGAEDNAHNEILSNADSLSTFVSEQQMESQEPADLTGVTVQSPGEAQCLLGPAEAEGSQRRRLLVPANGADPTETLMLFFDKFANIVPFDSWDQLMRQLDLTKNEIDVVRAGTAGPGDALYAMLMKWVNKTGRNASIHTLLDALERMEERHAKEKIQDLLVDSGKFIYLEDGTGSAVSLEXKTLFTRGFLLGVRS

SEQ ID NO: 688 - protein, 420 aa, Homo Sapiens
  misc_feature (402)..(402): Xaa can be any naturally occurring amino acid
MNNLLCCALVFLDISIKWTTQETFPPKYLHYDEETSHQLLCDKCPPGTYLKQHCTAKWKTVCAPCPDHYYTDSWHTSDECLYCSPVCKELQYVKQECNRTHNRVCECKEGRYLEIEFCLKHRSCPPGFGVVQAGTPERNTVCKRCPDGFFSNETSSKAPCRKHTNCSVFGLLLTQKGNATHDNICSGNSESTQKCGIDVTLCEEAFFRFAVPTKFTPNWLSVLVDNLPGTKVNAESVERIKRQHSSQEQTFQLLKLWKHQNKDQDIVKKIIQDIDLCENSVQRHIGHANLTFEQLRSLMESLPGKKVGAEDIEKTIKACKPSDQILKLLSLWRIKNGDQDTLKGLMHALKHSKTYHFPKTVTQSLKKTIRFLHSFTMYKLYQKLFLEMIGNQVQSVKISCLXLEMAIELFPHNWRDPMDE

SEQ ID NO: 689 - protein, 148 aa, Homo Sapiens
  misc_feature (130)..(130): Xaa can be any naturally occurring amino acid
MARGSLRRLLRLLVLGLWLALLRSVAGEQAPGTAPCSRGSSWSADLDKCMDCASCRARPHSDFCLGCAAAPPAPFRLLWPILGGALSLTFVLGLLSGFLVWRRCRRREKFTTPIEETGGEGCPAVALIQXQCAPCQPGLAHSSFIHPF

SEQ ID NO: 690 - protein, 361 aa, Homo Sapiens
  misc_feature (284)..(284): Xaa can be any naturally occurring amino acid
MEPPGDWGPPPWRSTPKTDVLRLVLYLTFLGAPCYAPALPSCKEDEYPVGSECCPKCSPGYRVKEACGELTGTVCEPCPPGTYIAHLNGLSKCLQCQMCDPAMGLRASRNCSRTENAVCGCSPGHFCIVQDGDHCAACRAYATSSPGQRVQKGGTESQDTLCQNCPPGTFSPNGTLEECQHQTKCSWLVTKAGAGTSSSHWVWWFLSGSLVIVIVCSTVGLIICVKRRKPRGDVVKVIVSVQRKRQEAEGEATVIEALQAPPDVTTVAVEETIPSFTGRSPNHXPTDSAPRRQRYLERRLLKEAVHLAEPPEPGGLGAPPWAGFRLLQWRERWGPCWGRAGDATCHSHGPVRAWGLCSAVA

SEQ ID NO: 691 - protein, 260 aa, Homo Sapiens
  misc_feature (256)..(256): Xaa can be any naturally occurring amino acid
MGNSCYNIVATLLLVLNFERTRSLQDPCSNCPAGTFCDNNRNQICSPCPPNSFSSAGGQRTCDICRQCKGVFRTRKECSSTSNAECDCTPGFHCLGAGCSMCEQDCKQGQELTKKGCKDCCFGTFNDQKRGICRPWTNCSLDGKSVLVNGTKERDVVCGPSPADLSPGASSVTPPAPAREPGHSPQIISFFLALTSTALLFLLFFLTLRFSVVKRGRKKLLYIFKQPFMRPVQTTQEEDGCSCRFPEEEEGGCELXNGSQ

SEQ ID NO: 692 - protein, 293 aa, Homo Sapiens
  misc_feature (282)..(282): Xaa can be any naturally occurring amino acid
MAMMEVQGGPSLGQTCVLIVIFTVLLQSLCVAVTYVYFTNELKQMQDKYSKSGIACFLKEDDSYWDPNDEESMNSPCWQVKWQLRQLVRKMILRTSEETISTVQEKQQNISPLVRERGPQRVAAHITGTRGRSNTLSSPNSKNEKALGRKINSWESSRSGHSFLSNLHLRNGELVIHEKGFYYIYSQTYFRFQEEIKENTKNDKQMVQYIYKYTSYPDPILLMKSARNSCWSKDAEYGLYSIYQGGIFELKENDRIFVSVTNEHLIDMDHEASFFGAFLVGXLTWKEKAITSK

SEQ ID NO: 693 - protein, 305 aa, Homo Sapiens
  misc_feature (251)..(251): Xaa can be any naturally occurring amino acid
MPASSPFLLAPKGPPGNMGGPVREPALSVALWLSWGAALGAVACAMALLTQQTELQSLRREVSRLQGTGGPSQNGEGYPWQSLPEQSSDALEAWENGERSRKRRAVLTQKQKKQHSVLHLVPINATSKDDSDVTEVMWQPALRRGRGLQAQGYGVRIQDAGVYLLYSQVLFQDVTFTMGQVVSREGQGRQETLFRCIRSMPSHPDRAYNSCYSAGVFHLHQGDILSVIIPRARAKLNLSPHGTFLGFVKLXLCYKKWLPAWKTRVGTYWRQPRAEYIKERECAGTEASSWVWLPVPHFSLFIPTP

SEQ ID NO: 694 - protein, 289 aa, Homo Sapiens
  misc_feature (235)..(235): Xaa can be any naturally occurring amino acid
MPASSPFLLAPKGPPGNMGGPVREPALSVALWLSWGAALGAVACAMALLTQQTELQSLRREVSRLQGTGGPSQNGEGYPWQSLPEQSSDALEAWENGERSRKRRAVLTQKQKNDSDVTEVMWQPALRRGRGLQAQGYGVRIQDAGVYLLYSQVLFQDVTFTMGQVVSREGQGRQETLFRCIRSMPSHPDRAYNSCYSAGVFHLHQGDILSVIIPRARAKLNLSPHGTFLGFVKLXLCYKKWLPAWKTRVGTYWRQPRAEYIKERECAGTEASSWVWLPVPHFSLFIPTP

SEQ ID NO: 695 - protein, 359 aa, Homo Sapiens
  misc_feature (248)..(248): Xaa can be any naturally occurring amino acid
MPASSPFLLAPKGPPGNMGGPVREPALSVALWLSWGAALGAVACAMALLTQQTELQSLRREVSRLQGTGGPSQNGEGYPWQSLPEQSSDALEAWENGERSRKRRAVLTQKQKKQHSVLHLVPINATSKDDSDVTEVMWQPALRRGRGLQAQGYGVRIQDAGVYLLYSQVLFQDVTFTMGQVVSREGQGRQETLFRCIRSMPSHPDRAYNSCYSAGVFHLHQGDILSVIIPRARAKLNLSPHGTFLGLXFYGYLASVPHGAPNSCVCVDEGRGTGARHCPDLVGAHWKHPEQHHHLAAARGKHPPVGRSPRSRPLLGKTPGSPCHTSLQVPSASSPHKKPYPTSFSPSIGPQFPSLSPEM

SEQ ID NO: 696 - protein, 190 aa, Homo Sapiens
  misc_feature (184)..(184): Xaa can be any naturally occurring amino acid
MERVQPLEENVGNAARPRFERNKLLLVASVIQGLGLLLCFTYICLHFSALQVSHRYPRIQSIKVQFTEYKKEKGFILTSQKEDEIMKVQNNSVIINCDGFYLISLKGYFSQEVNISLHYQKDEEPLFQLKKVRSVNSLMVASLTYKDKVYLNVTTDNTSLDDFHVNGGELILIHQNPGEFCVLXGADGNI

SEQ ID NO: 697 - protein, 1538 aa, Homo Sapiens
  misc_feature (1532)..(1532): Xaa can be any naturally occurring amino acid
MEVSPLQPVNENMQVNKIKKNEDAKKRLSVERIYQKKTQLEHILLRPDTYIGSVELVTQQMWVYDEDVGINYREVTFVPGLYKIFDEILVNAADNKQRDPKMSCIRVTIDPENNLISIWNNGKGIPVVEHKVEKMYVPALIFGQLLTSSNYDDDEKKVTGGRNGYGAKLCNIFSTKFTVETASREYKKMFKQTWMDNMGRAGEMELKPFNGEDYTCITFQPDLSKFKMQSLDKDIVALMVRRAYDIAGSTKDVKVFLNGNKLPVKGFRSYVDMYLKDKLDETGNSLKVIHEQVNHRWEVCLTMSEKGFQQISFVNSIATSKGGRHVDYVADQIVTKLVDVVKKKNKGGVAVKAHQVKNHMWIFVNALIENPTFDSQTKENMTLQPKSFGSTCQLSEKFIKAAIGCGIVESILNWVKFKAQVQLNKKCSAVKHNRIKGIPKLDDANDAGGRNSTECTLILTEGDSAKTLAVSGLGVVGRDKYGVFPLRGKILNVREASHKQIMENAEINNIIKIVGLQYKKNYEDEDSLKTLRYGKIMIMTDQDQDGSHIKGLLINFIHHNWPSLLRHRFLEEFITPIVKVSKNKQEMAFYSLPEFEEWKSSTPNHKKWKVKYYKGLGTSTSKEAKEYFADMKRHRIQFKYSGPEDDAAISLAFSKKQIDDRKEWLTNFMEDRRQRKLLGLPEDYLYGQTTTYLTYNDFINKELILFSNSDNERSIPSMVDGLKPGQRKVLFTCFKRNDKREVKVAQLAGSVAEMSSYHHGEMSLMMTIINLAQNFVGSNNLNLLQPIGQFGTRLHGGKDSASPRYIFTMLSSLARLLFPPKDDHTLKFLYDDNQRVEPEWYIPIIPMVLINGAEGIGTGWSCKIPNFDVREIVNNIRRLMDGEEPLPMLPSYKNFKGTIEELAPNQYVISGEVAILNSTTIEISELPVRTWTQTYKEQVLEPMLNGTEKTPPLITDYREYHTDTTVKFVVKMTEEKLAEAERVGLHKVFKLQTSLTCNSMVLFDHVGCLKKYDTVLDILRDFFELRLKYYGLRKEWLLGMLGAESAKLNNQARFILEKIDGKIIIENKPKKELIKVLIQRGYDSDPVKAWKEAQQKVPDEEENEESDNEKETEKSDSVTDSGPTFNYLLDMPLWYLTKEKKDELCRLRNEKEQELDTLKRKSPSDLWKEDLATFIEELEAVEAKEKQDEQVGLPGKGGKAKGKKTQMAEVLPSPRGQRVIPRITIEMKAEAEKKNKKKIKNENTEGSPQEDGVELEGLKQRLEKKQKREPGTKTKKQTTLAFKPIKKGKKRNPWSDSESDRSSDESNFDVPPRETEPRRAATKTKFTMDLDSDEDFSDFDEKTDDEDFVPSDASPPKTKTSPKLSNKELKPQKSVVSDLEADDVKGSVPLSSSPPATHFPDETEITNPVPKKNVTVKKTAAKSQSSTSTTGAKKRAAPKGTKRDPALNSGVSQKPDPAKTKNRRKRKPSTSDDSDSNFEKIVSKAVTSKKSKGESDDFHMDFDSAVAPRAKSVRAKKPIKYLEESDEDDLFXNVRRLF

SEQ ID NO: 698 - protein, 1012 aa, Homo Sapiens
  misc_feature (1006)..(1006): Xaa can be any naturally occurring amino acid
MDLTLAELQEMASRQQQQIEAQQQLLATKEQRLKFLKQQDQRQQQQVAEQEKLKRLKEIAENQEAKLKKVRALKGHVEQKRLSNGKLVEEIEQMNNLFQQKQRELVLAVSKVEELTRQLEMLKNGRIDSHHDNQSAVAELDRLYKELQLRNKLNQEQNAKLQQQRECLNKRNSEVAVMDKRVNELRDRLWKKKAALQQKENLPVSSDGNLPQQAASAPSRVAAVGPYIQSSTMPRMPSRPELLVKPALPDGSLVIQASEGPMKIQTLPNMRSGAASQTKGSKIHPVGPDWSPSNADLFPSQGSASVPQSTGNALDQVDDGEVPLREKEKKVRPFSMFDAVDQSNAPPSFGTLRKNQSSEDILRDAQVANKNVAKVPPPVPTKPKQINLPYFGQTNQPPSDIKPDGSSQQLSTVVPSMGTKPKPAGQQPRVLLSPSIPSVGQDQTLSPGSKQESPPAAAVRPFTPQPSKDTLLPPFRKPQTVAASSIYSMYTQQQAPGKNFQQAVQSALTKTHTRGPHFSSVYGKPVIAAAQNQQQHPENIYSNSQGKPGSPEPETEPVSSVQENHENERIPRPLSPTKLLPFLSNPYRNQSDADLEALRKKLSNAPRPLKKRSSITEPEGPNGPNIQKLLYQRTTIAAMETISVPSYPSKSASVTASSESPVEIQNPYLHVEPEKEVVSLVPESLSPEDVGNASTENSDMPAPSPGLDYEPEGVPDNSPNLQNNPEEPNPEAPHVLDVYLEEYPPYPPPPYPSGEPEGPGEDSVSMRPPEITGQVSLPPGKRTNLRKTGSERIAHGMRVKFNPLALLLDSSLEGEFDLVQRIIYEVDDPSLPNDEGITALHNAVCAGHTEIVKFLVQFGVNVNAADSDGWTPLHCAASCNNVQVCKFLVESGAAVFAMTYSDMQTAADKCEEMEEGYTQCSQFLYGVQEKMGIMNKGVIYALWDYEPQNDDELPMKEGDCMTIIHREDEDEIEWWWARLNDKEGYVPRNLLGLYPRIKPRQRSLAXNFHTEF

SEQ ID NO: 699 - protein, 229 aa, Homo Sapiens
  misc_feature (185)..(185): Xaa can be any naturally occurring amino acid
MDRGEQGLLRTDPVPEEGEDVAATISATETLSEEEQEELRRELAKVEEEIQTLSQVLAAKEKHLAEIKRKLGINSLQELKQNIAKGWQDVTATSAYKKTSETLSQAGQKASAAFSSVGSVITKKLEDVKNSPTFKSFEEKVENLKSKVGGTKPAGGDFGEVLNSAANASATTTEPLPEKTQESLXDSYLCSATHCQMLQARSKHILSTCIAMNFYQMCFYLALHIPLTK

SEQ ID NO: 700 - protein, 304 aa, Homo Sapiens
  misc_feature (250)..(250): Xaa can be any naturally occurring amino acid
MAPSRKFFVGGNWKMNGRKQSLGELIGTLNAAKVPADTEVVCAPPTAYIDFARQKLDPKIAVAAQNCYKVTNGAFTGEISPGMIKDCGATWVVLGHSERRHVFGESDELIGQKVAHALAEGLGVIACIGEKLDEREAGITEKVVFEQTKVIADNVKDWSKVVLAYEPVWAIGTGKTATPQQAQEVHEKLRGWLKSNVSDAVAQSTRIIYGGSVTGATCKELASQPDVDGFLVGGASLKPEFVDIINAKQXAPSIFPTLPAKPGTKQPRSPVTALSLHMLLMVSSAPSCGLIQTVSSFTVYIFTL

SEQ ID NO: 701 - protein, 300 aa, Homo Sapiens
  misc_feature (285)..(285): Xaa can be any naturally occurring amino acid
MDAIKKKMQMLKLDKENALDRAEQAEADKKAAEDRSKQLEDELVSLQKKLKGTEDELDKYSEALKDAQEKLELAEKKATDAEADVASLNRRIQLVEEELDRAQERLATALQKLEEAEKAADESERGMKVIESRAQKDEEKMEIQEIQLKEAKHIAEDADRKYEEVARKLVIIESDLERAEERAELSEGQVRQLEEQLRIMDQTLKALMAAEDKYSQKEDRYEEEIKVLSDKLKEAETRAEFAERSVTKLEKSIDDLEDELYAQKLKYKAISEELDHALNDMTSMXTFIHSACLHPALMLI

SEQ ID NO: 702 - protein, 304 aa, Homo Sapiens
  misc_feature (285)..(285): Xaa can be any naturally occurring amino acid
MDAIKKKMQMLKLDKENALDRAEQAEADKKAAEDRSKQLEDELVSLQKKLKGTEDELDKYSEALKDAQEKLELAEKKATDAEADVASLNRRIQLVEEELDRAQERLATALQKLEEAEKAADESERGMKVIESRAQKDEEKMEIQEIQLKEAKHIAEDADRKYEEVARKLVIIESDLERAEERAELSEGKCAELEEELKTVTNNLKSLEAQAEKYSQKEDRYEEEIKVLSDKLKEAETRAEFAERSVTKLEKSIDDLEDELYAQKLKYKAISEELDHALNDMTSIXVSLLHFSQDSLVELDVPPL

SEQ ID NO: 703 - protein, 751 aa, Homo Sapiens
  misc_feature (748)..(748): Xaa can be any naturally occurring amino acid
MSQVKSSYSYDAPSDFINFSSLDDEGDTQNIDSWFEEKANLENKLLGKNGTGGLFQGKTPLRKANLQQAIVTPLKPVDNTYYKEAEKENLVEQSIPSNACSSLEVEAAISRKTPAQPQRRSLRLSAQKDLEQKEKHHVKMKAKRCATPVIIDEILPSKKMKVSNNKKKPEEEGSAHQDTAEKNASSPEKAKGRHTVPCMPPAKQKFLKSTEEQELEKSMKMQQEVVEMRKKNEEFKKLALAGIGQPVKKSVSQVTKSVDFHFRTDERIKQHPKNQEEYKEVNFTSELRKHPSSPARVTKGCTIVKPFNLSQGKKRTFDETVSTYVPLAQQVEDFHKRTPNRYHLRSKKDDINLLPSKSSVTKICRDPQTPVLQTKHRARAVTCKSTAELEAEELEKLQQYKFKARELDPRILEGGPILPKKPPVKPPTEPIGFDLEIEKRIQERESKKKTEDEHFEFHSRPCPTKILEDVVGVPEKKVLPITVPKSPAFALKNRIRMPTKEDEEEDEPVVIKAQPVPHYGVPFKPQIPEARTVEICPFSFDSRDKERQLQKEKKIKELQKGEVPKFKALPLPHFDTINLPEKKVKNVTQIEPFCLETDRRGALKAQTWKHQLEEELRQQKEAACFKARPNTVISQEPFVPKKEKKSVAEGLSGSLVQEPFQLATEKRAKERQELEKRMAEVEAQKAQQLEEARLQEEEQKKEELARLRRELVHKANPIRKYQGLEIKSSDQPLTVPVSPKFSTRFHCXTQL

SEQ ID NO: 704 - protein, 422 aa, Homo Sapiens
  misc_feature (417)..(417): Xaa can be any naturally occurring amino acid
MASSSGSSPRPAPDENEFPFGCPPTVCQDPKEPRALCCAGCLSENPRNGEDQICPKCRGEDLQSISPGSRLRTQEKAHPEVAEAGIGCPFAGVGCSFKGSPQSVQEHEVTSQTSHLNLLLGFMKQWKARLGCGLESGPMALEQNLSDLQLQAAVEVAGDLEVDCYRAPCSESQEELALQHFMKEKLLAELEGKLRVFENIVAVLNKEVEASHLALATSIHQSQLDRERILSLEQRVVELQQTLAQKDQALGKLEQSLRLMEEASFDGTFLWKITNVTRRCHESACGRTVSLFSPAFYTAKYGYKLCLRLYLNGDGTGKRTHLSLFIVIMRGEYDALLPWPFRNKVTFMLLDQNNREHAIDAFRPDLSSASFQRPQSETNVASGCPLFFPLSKLQSPKHAYVKDDTMFLKCIVETSTXGGRGS

SEQ ID NO: 705 - protein, 622 aa, Homo Sapiens
  misc_feature (502)..(502): Xaa can be any naturally occurring amino acid
MAAASVTPPGSLELLQPGFSKTLLGTKLEAKYLCSACRNVLRRPFQAQCGHRYCSFCLASILSSGPQNCAACVHEGIYEEGISILESSSAFPDNAARREVESLPAVCPSDGCTWKGTLKEYESCHEGRCPLMLTECPACKGLVRLGEKERHLEHECPERSLSCRHCRAPCCGADVKAHHEVCPKFPLTCDGCGKKKIPREKFQDHVKTCGKCRVPCRFHAIGCLETVEGEKQQEHEVQWLREHLAMLLSSVLEAKPLLGDQSHAGSELLQRCESLEKKTATFENIVCVLNREVERVAMTAEACSRQHRLDQDKIEALSSKVQQLERSIGLKDLAMADLEQKVLEMEASTYDGVFIWKISDFARKRQEAVAGRIPAIFSPAFYTSRYGYKMCLRIYLNGDGTGRGTHLSLFFVVMKGPNDALLRWPFNQKVTLMLLDQNNREHVIDAFRPDVTSSSFQRPVNDMNIASGCPLFCPVSKMEAKNSYVRDDAIFIKAIVDLTGLXLPPTGVWGLGAARHSRLTEGPPRWARVSLYKWAGAALGRLGGCRPAAKFTVTGEGATSQSSDFRDCGGAWQTVLAKGCGGIGRGSSGASQHKLPLLSCAVKGEALGGGHSEWEHIPAVPM

SEQ ID NO: 706 - protein, 555 aa, Homo Sapiens
  misc_feature (471)..(471): Xaa can be any naturally occurring amino acid
MPGFDYKFLEKPKRRLLCPLCGKPMREPVQVSTCGHRFCDTCLQEFLSEGVFKCPEDQLPLDYAKIYPDPELEVQVLGLPIRCIHSEEGCRWSGPLRHLQGHLNTCSFNVIPCPNRCPMKLSRRDLPAHLQHDCPKRRLKCEFCGCDFSGEAYESHEGMCPQESVYCENKCGARMMRRLLAQHATSECPKRTQPCTYCTKEFVFDTIQSHQYQCPRLPVACPNQCGVGTVAREDLPGHLKDSCNTALVLCPFKDSGCKHRCPKLAMARHVEESVKPHLAMMCALVSRQRQELQELRRELEELSVGSDGVLIWKIGSYGRRLQEAKAKPNLECFSPAFYTHKYGYKLQVSAFLNGNGSGEGTHLSLYIRVLPGAFDNLLEWPFARRVTFSLLDQSDPGLAKPQHVTETFHPDPNWKNFQKPGTWRGSLDESSLGFGYPKFISHQDIRKRNYVRDDAVFIRAAVELPRKILSXVQVGFEGKGRWGMTSVRHWLNLERGPDPRQLLLLPRFCYPILPPPATTLRCLQLVLQPWPLWGTGLGVMKGWKQVTPGPVSLLG

SEQ ID NO: 707 - protein, 251 aa, Homo Sapiens
  misc_feature (238)..(238): Xaa can be any naturally occurring amino acid
MAGVSACIKYSMFTFNFLFWLCGILILALAIWVRVSNDSQAIFGSEDVGSSSYVAVDILIAVGAIIMILGFLGCCGAIKESRCMLLLFFIGLLLILLLQVATGILGAVFKSKSDRIVNETLYENTKLLSATGESEKQFQEAIIVFQEEFKCCGLVNGAADWGNNFQHYPELCACLDKQRPCQSYNGKQVYKETCISFIKDFLAKNLIIVIGISFGLAVIEILGLVFSMVLYCQIGNKXICGCINLSSVKPL

SEQ ID NO: 708 - protein, 201 aa, Homo Sapiens
  misc_feature (170)..(170): Xaa can be any naturally occurring amino acid
MAPPWVPAMGFTLAPSLGCFVGSRFVHGEGLRWYAGLQKPSWHPPHWVLGPVWGTLYSAMGYGSYLVWKELGGFTEKAVVPLGLYTGQLALNWAWPPIFFGARQMGWALVDLLLVSGAAAATTVAWYQVSPLAARLLYPYLAWLAFTTTLNYCVWRDNHGWRGGRRLPEXVPGPPGTAAAPAGAITLVMWWPSRFHDHWAC

SEQ ID NO: 709 - protein, 147 aa, Homo Sapiens
  misc_feature (111)..(111): Xaa can be any naturally occurring amino acid
MGASGSKARGLWPFASAAGGGGSEAAGAEQALVRPRGRAVPPFVFTRRGSMFYDEDGDLAHEFYEETIVTKNGQKRAKLRRVHKNLIPQGIVKLDHPRIHVDFPVILYEVXPWEVADRSTPCPGKKLPGSIKVWLPLRSPGWGHNPE

SEQ ID NO: 710 - protein, 216 aa, Homo Sapiens
  misc_feature (203)..(203): Xaa can be any naturally occurring amino acid
MMQDVSSSPVSPADDSLSNSEEEPDRQQPPSGKRGGRKRRSSRRSAGGGAGPGGAAGGGVGGGDEPGSPAQGKRGKKSAGCGGGGGAGGGGGSSSGGGSPQSYEELQTQRVMANVRERQRTQSLNEAFAALRKIIPTLPSDKLSKIQTLKLAARYIDFLYQVLQSDELDSKMASCSYVAHERLSYAFSVWRMEGAWSMSASHXQAEPPTPSAGPET

SEQ ID NO: 711 - protein, 582 aa, Homo Sapiens
  misc_feature (547)..(547): Xaa can be any naturally occurring amino acid
MKNQDKKNGAAKQSNPKSSPGQPEAGPEGAQERPSQAAPAVEAEGPGSSQAPRKPEGAQARTAQSGALRDVSEELSRQLEDILSTYCVDNNQGGPGEDGAQGEPAEPEDAEKSRTYVARNGEPEPTPVVNGEKEPSKGDPNTEEIRQSDEVGDRDHRRPQEKKKAKGLGKEITLLMQTLNTLSTPEEKLAALCKKYAELLEEHRNSQKQMKLLQKKQSQLVQEKDHLRGEHSKAVLARSKLESLCRELQRHNRSLKEEGVQRAREEEEKRKEVTSHFQVTLNDIQLQMEQHNERNSKLRQENMELAERLKKLIEQYELREEHIDKVFKHKDLQQQLVDAKLQQAQEMLKEAEERHQREKDFLLKEAVESQRMCELMKQQETHLKQQLALYTEKFEEFQNTLSKSSEVFTTFKQEMEKMTKKIKKLEKETTMYRSRWESSNKALLEMAEEKTVRDKELEGLQVKIQRLEKLCRALQTERNDLNKRVQDLSAGGQGSLTDSGPERRPEGPGAQAPSSPRVTEAPCYPGAPSTEASGQTGPQEPTSARAXRAWCWVMLGRERQPSQAWPIKGSHAEQPIAEARMF

SEQ ID NO: 712 - protein, 554 aa, Homo Sapiens
  misc_feature (499)..(499): Xaa can be any naturally occurring amino acid
MNGPEDLPKSYDYDLIIIGGGSGGLAAAKEAAQYGKKVMVLDFVTPTPLGTRWGLGGTCVNVGCIPKKLMHQAALLGQALQDSRNYGWKVEETVKHDWDRMIEAVQNHIGSLNWGYRVALREKKVVYENAYGQFIGPHRIKATNNKGKEKIYSAERFLIATGERPRYLGIPGDKEYCISSDDLFSLPYCPGKTLVVGASYVALECAGFLAGIGLDVTVMVRSILLRGFDQDMANKIGEHMEEHGIKFIRQFVPIKVEQIEAGTPGRLRVVAQSTNSEEIIEGEYNTVMLAIGRDACTRKIGLETVGVKINEKTGKIPVTDEEQTNVPYIYAIGDILEDKVELTPVAIQAGRLLAQRLYAGSTVKCDYENVPTTVFTPLEYGACGLSEEKAVEKFGEENIEVYHSYFWPLEWTIPSRDNNKCYAKIICNTKDNERVVGFHVLGPNAGEVTQGFAAALKCGLTKKQLDSTIGIHPVCAEVFTTLSVTKRSGASILQAGCGXAPVWMLLPRLQTTGSFPCPNPRRSFLEGSWALGTCVSCAYHRPRPPWISWIGVGE

SEQ ID NO: 713 - protein, 320 aa, Homo Sapiens
  misc_feature (314)..(314): Xaa can be any naturally occurring amino acid
MPVAGSELPRRPLPPAAQERDAEPRPPHGELQYLGQIQHILRCGVRKDDRTGTGTLSVFGMQARYSLRDEFPLLTTKRVFWKGVLEELLWFIKGSTNAKELSSKGVKIWDANGSRDFLDSLGFSTREEGDLGPVYGFQWRHFGAEYRDMESDYSGQGVDQLQRVIDTIKTNPDDRRIIMCAWNPRDLPLMALPPCHALCQFYVVNSELSCQLYQRSGDMGLGVPFNIASYALLTYMIAHITGLKPGDFIHTLGDAHIYLNHIEPLKIQLQREPRPFPKLRILRKVEKIDDFKAEDFQIEGYNPHPTIKMEMAVXGAFKGA

SEQ ID NO: 714 - protein, 907 aa, Homo Sapiens
  misc_feature (891)..(891): Xaa can be any naturally occurring amino acid
MALRRSMGRPGLPPLPLPPPPRLGLLLAALASLLLPESAAAGLKLMGAPVKLTVSQGQPVKLNCSVEGMEEPDIQWVKDGAVVQNLDQLYIPVSEQHWIGFLSLKSVERSDAGRYWCQVEDGGETEISQPVWLTVEGVPFFTVEPKDLAVPPNAPFQLSCEAVGPPEPVTIVWWRGTTKIGGPAPSPSVLNVTGVTQSTMFSCEAHNLKGLASSRTATVHLQALPAAPFNITVTKLSSSNASVAWMPGADGRALLQSCTVQVTQAPGGWEVLAVVVPVPPFTCLLRDLVPATNYSLRVRCANALGPSPYADWVPFQTKGLAPASAPQNLHAIRTDSGLILEWEEVIPEAPLEGPLGPYKLSWVQDNGTQDELTVEGTRANLTGWDPQKDLIVRVCVSNAVGCGPWSQPLVVSSHDRAGQQGPPHSRTSWVPVVLGVLTALVTAAALALILLRKRRKETRFGQAFDSVMARGEPAVHFRAARSFNRERPERIEATLDSLGISDELKEKLEDVLIPEQQFTLGRMLGKGEFGSVREAQLKQEDGSFVKVAVKMLKADIIASSDIEEFLREAACMKEFDHPHVAKLVGVSLRSRAKGRLPIPMVILPFMKHGDLHAFLLASRIGENPFNLPLQTLIRFMVDIACGMEYLSSRNFIHRDLAARNCMLAEDMTVCVADFGLSRKIYSGDYYRQGCASKLPVKWLALESLADNLYTVQSDVWAFGVTMWEIMTRGQTPYAGIENAEIYNYLIGGNRLKQPPECMEDVYDLMYQCWSADPKQRPSFTCLRMELENILGQLSVLSASQDPLYINIERAEEPTAGGSLELPGRDQPYSGAGDGSGMGAVGGTPSDCRYILTPGGLAEQPGQAEHQPESPLNETQRLLLLQQGLLPHSSCXPTGRGHRGHLAGSGGH

SEQ ID NO: 715 - protein, 1064 aa, Homo Sapiens
  misc_feature (1059)..(1059): Xaa can be any naturally occurring amino acid
MSSSPLSKKRRVSGPDPKPGSNCSPAQSVLSEVPSVPTNGMAKNGSEADIDEGLYSRQLYVLGHEAMKRLQTSSVLVSGLRGLGVEIAKNIILGGVKAVTLHDQGTAQWADLSSQFYLREEDIGKNRAEVSQPRLAELNSYVPVTAYTGPLVEDFLSGFQVVVLTNTPLEDQLRVGEFCHNRGIKLVVADTRGLFGQLFCDFGEEMILTDSNGEQPLSAMVSMVTKDNPGVVTCLDEARHGFESGDFVSFSEVQGMVELNGNQPMEIKVLGPYTFSICDTSNFSDYIRGGIVSQVKVPKKISFKSLVASLAEPDFVVTDFAKFSRPAQLHIGFQALHQFCAQHGRPPRPRNEEDAAELVALAQAVNARALPAVQQNNLDEDLIRKLAYVAAGDLAPINAFIGGLAAQEVMKACSGKFMPIMQWLYFDALECLPEDKEVLTEDKCLQRQNRYDGQVAVFGSDLQEKLGKQKYFLVGAGAIGCELLKNFAMIGLGCGEGGEIIVTDMDTIEKSNLNRQFLFRPWDVTKLKSDTAAAAVRQMNPHIRVTSHQNRVGPDTERIYDDDFFQNLDGVANALDNVDARMYMDRRCVYYRKPLLESGTLGTKGNVQVVIPFLTESYSSSQDPPEKSIPICTLKNFPNAIEHTLQWARDEFEGLFKQPAENVNQYLTDPKFVERTLRLAGTQPLEVLEAVQRSLVLQRPQTWADCVTWACHHWHTQYSNNIRQLLHNFPPDQLTSSGAPFWSGPKRCPHPLTFDVNNPLHLDYVMAAANLFAQTYGLTGSQDRAAVATFLQSVQVPEFTPKSGVKIHVSDQELQSANASVDDSRLEELKATLPSPDKLPGFKMYPIDFEKDDDSNFHMDFIVAASNLRAENYDIPSADRHKSKLIAGKIIPAIATTTAAVVGLVCLELYKVVQGHRQLDSYKNGFLNLALPFFGFSEPLAAPRHQYYNQEWTLWDRFEVQGLQPNGEEMTLKQFLDYFKTEHKLEITMLSQGVSMLYSFFMPAAKLKERLDQPMTEIVSRVSKRKLGRHVRALVLELCCNDESGEDVEVPYVRYTIRXPRLLL

SEQ ID NO: 716 - protein, 202 aa, Homo Sapiens
  misc_feature (180)..(180): Xaa can be any naturally occurring amino acid
MASQNRDPAATSVAAARKGAEPSGGAARGPVGKRLQQELMTLMMSGDKGISAFPESDNLFKWVGTIHGAAGTVYEDLRYKLSLEFPSGYPYNAPTVKFLTPCYHPNVDTQGNICLDILKEKWSALYDVRTILLSIQSLLGEPNIDSPLNTHAAELWKNPTAFKKYLQETYSKQVTSQEPXPRLPSLSLCRLFNFSLDGLSFL

SEQ ID NO: 717 - protein, 191 aa, Homo Sapiens
  misc_feature (159)..(159): Xaa can be any naturally occurring amino acid
MSGIALSRLAQERKAWRKDHPFGFVAVPTKNPDGTMNLMNWECAIPGKKGTPWEGGLFKLRMLFKDDYPSSPPKCKFEPPLFHPNVYPSGTVCLSILEEDKDWRPAITIKQILLGIQELLNEPNIQDPAQAEAYTIYCQNRVEYEKRVRAQAKKFAPSXAATLWHRQKEGIGLARTCLQHFCKSKVAPYND

SEQ ID NO: 718 - protein, 176 aa, Homo Sapiens
  misc_feature (153)..(153): Xaa can be any naturally occurring amino acid
MAGLPRRIIKETQRLLAEPVPGIKAEPDESNARYFHVVIAGPQDSPFEGGTFKLELFLPEEYPMAAPKVRFMTKIYHPNVDKLGRICLDILKDKWSPALQIRTVLLSIQALLSAPNPDDPLANDVAEQWKTNEAQAIETARAWTRLYAMNNIXIDTIIKCASLLLFCQDFLLFVCI

SEQ ID NO: 719 - protein, 539 aa, Homo Sapiens
  misc_feature (534)..(534): Xaa can be any naturally occurring amino acid
MAVESQGGRPLVLGLLLCVLGPVVSHAGKILLIPVDGSHWLSMLGAIQQLQQRGHEIVVLAPDASLYIRDGAFYTLKTYPVPFQREDVKESFVSLGHNVFENDSFLQRVIKTYKKIKKDSAMLLSGCSHLLHNKELMASLAESSFDVMLTDPFLPCSPIVAQYLSLPTVFFLHALPCSLEFEATQCPNPFSYVPRPLSSHSDHMTFLQRVKNMLIAFSQNFLCDVVYSPYATLASEFLQREVTVQDLLSSASVWLFRSDFVKDYPRPIMPNMVFVGGINCLHQNPLSQEFEAYINASGEHGIVVFSLGSMVSEIPEKKAMAIADALGKIPQTVLWRYTGTRPSNLANNTILVKWLPQNDLLGHPMTRAFITHAGSHGVYESICNGVPMVMMPLFGDQMDNAKRMETKGAGVTLNVLEMTSEDLENALKAVINDKSYKENIMRLSSLHKDRPVEPLDLAVFWVEFVMRHKGAPHLRPAAHDLTWYQYHSLDVIGFLLAVVLTVAFITFKCCAYGYRKCLGKKGRVKKAHKSKTHXEVGGK

SEQ ID NO: 720 - protein, 536 aa, Homo Sapiens
  misc_feature (531)..(531): Xaa can be any naturally occurring amino acid
MARAGWTSPVPLCVCLLLTCGFAEAGKLLVVPMDGSHWFTMQSVVEKLILRGHEVVVVMPEVSWQLERSLNCTVKTYSTSYTLEDQNREFMVFAHAQWKAQAQSIFSLLMSSSSGFLDLFFSHCRSLFNDRKLVEYLKESSFDAVFLDPFDTCGLIVAKYFSLPSVVFTRGIFCHHLEEGAQCPAPLSYVPNDLLGFSDAMTFKERVWNHIVHLEDHLFCQYLFRNALEIASEILQTPVTAYDLYSHTSIWLLRTDFVLDYPKPVMPNMIFIGGINCHQGKPLPMEFEAYINASGEHGIVVFSLGSMVSEIPEKKAMAIADALGKIPQTVLWRYTGTRPSNLANNTILVKWLPQNDLLGHPMTRAFITHAGSHGVYESICNGVPMVMMPLFGDQMDNAKRMETKGAGVTLNVLEMTSEDLENALKAVINDKSYKENIMRLSSLHKDRPVEPLDLAVFWVEFVMRHKGAPHLRPAAHDLTWYQYHSLDVIGFLLAVVLTVAFITFKCCAYGYRKCLGKKGRVKKAHKSKTHXEVGGK

SEQ ID NO: 721 - protein, 540 aa, Homo Sapiens
  misc_feature (535)..(535): Xaa can be any naturally occurring amino acid
MATGLQVPLPWLATGLLLLLSVQPWAESGKVLVVPIDGSHWLSMREVLRELHARGHQAVVLTPEVNMHIKEENFFTLTTYAISWTQDEFDRHVLGHTQLYFETEHFLKKFFRSMAMLNNMSLVYHRSCVELLHNEALIRHLNATSFDVVLTDPVNLCAAVLAKYLSIPTVFFLRNIPCDLDFKGTQCPNPSSYIPRLLTTNSDHMTFMQRVKNMLYPLALSYICHAFSAPYASLASELFQREVSVVDILSHASVWLFRGDFVMDYPRPIMPNMVFIGGINCANRKPLSQEFEAYINASGEHGIVVFSLGSMVSEIPEKKAMAIADALGKIPQTVLWRYTGTRPSNLANNTILVKWLPQNDLLGHPMTRAFITHAGSHGVYESICNGVPMVMMPLFGDQMDNAKRMETKGAGVTLNVLEMTSEDLENALKAVINDKSYKENIMRLSSLHKDRPVEPLDLAVFWVEFVMRHKGAPHLRPAAHDLTWYQYHSLDVIGFLLAVVLTVAFITFKCCAYGYRKCLGKKGRVKKAHKSKTHXEVGGK

SEQ ID NO: 722 - protein, 540 aa, Homo Sapiens
  misc_feature (535)..(535): Xaa can be any naturally occurring amino acid
MARGLQVPLPRLATGLLLLLSVQPWAESGKVLVVPTDGSPWLSMREALRELHARGHQAVVLTPEVNMHIKEEKFFTLTAYAVPWTQKEFDRVTLGYTQGFFETEHLLKRYSRSMAIMNNVSLALHRCCVELLHNEALIRHLNATSFDVVLTDPVNLCGAVLAKYLSIPAVFFWRYIPCDLDFKGTQCPNPSSYIPKLLTTNSDHMTFLQRVKNMLYPLALSYICHTFSAPYASLASELFQREVSVVDLVSYASVWLFRGDFVMDYPRPIMPNMVFIGGINCANGKPLSQEFEAYINASGEHGIVVFSLGSMVSEIPEKKAMAIADALGKIPQTVLWRYTGTRPSNLANNTILVKWLPQNDLLGHPMTRAFITHAGSHGVYESICNGVPMVMMPLFGDQMDNAKRMETKGAGVTLNVLEMTSEDLENALKAVINDKSYKENIMRLSSLHKDRPVEPLDLAVFWVEFVMRHKGAPHLRPAAHDLTWYQYHSLDVIGFLLAVVLTVAFITFKCCAYGYRKCLGKKGRVKKAHKSKTHXEVGGK

SEQ ID NO: 723 - protein, 536 aa, Homo Sapiens
  misc_feature (531)..(531): Xaa can be any naturally occurring amino acid
MACTGWTSPLPLCVCLLLTCGFAEAGKLLVVPMDGSHWFTMRSVVEKLILRGHEVVVVMPEVSWQLGRSLNCTVKTYSTSYTLEDLDREFKAFAHAQWKAQVRSIYSLLMGSYNDIFDLFFSNCRSLFKDKKLVEYLKESSFDAVFLDPFDNCGLIVAKYFSLPSVVFARGILCHYLEEGAQCPAPLSYVPRILLGFSDAMTFKERVRNHIMHLEEHLLCHRFFKNALEIASEILQTPVTEYDLYSHTSIWLLRTDFVLDYPKPVMPNMIFIGGINCHQGKPLPMEFEAYINASGEHGIVVFSLGSMVSEIPEKKAMAIADALGKIPQTVLWRYTGTRPSNLANNTILVKWLPQNDLLGHPMTRAFITHAGSHGVYESICNGVPMVMMPLFGDQMDNAKRMETKGAGVTLNVLEMTSEDLENALKAVINDKSYKENIMRLSSLHKDRPVEPLDLAVFWVEFVMRHKGAPHLRPAAHDLTWYQYHSLDVIGFLLAVVLTVAFITFKCCAYGYRKCLGKKGRVKKAHKSKTHXEVGGK

SEQ ID NO: 724 - protein, 566 aa, Homo Sapiens
  misc_feature (553)..(553): Xaa can be any naturally occurring amino acid
MDRKVAREFRHKVDFLIENDAEKDYLYDVLRMYHQTMDVAVLVGDLKLVINEPSRLPLFDAIRPLIPLKHQVEYDQLTPRRSRKLKEVRLDRLHPEGLGLSVRGGLEFGCGLFISHLIKGGQADSVGLQVGDEIVRINGYSISSCTHEEVINLIRTKKTVSIKVRHIGLIPVKSSPDEPLTWQYVDQFVSESGGVRGSLGSPGNRENKEKKVFISLVGSRGLGCSISSGPIQKPGIFISHVKPGSLSAEVGLEIGDQIVEVNGVDFSNLDHKEAVNVLKSSRSLTISIVAAAGRELFMTDRERLAEARQRELQRQELLMQKRLAMESNKILQEQQEMERQRRKEIAQKAAEENERYRKEMEQIVEEEEKFKKQWEEDWGSKEQLLLPKTITAEVHPVPLRKPKYDQGVEPELEPADDLDGGTEEQGEQDFRKYEEGFDPYSMFTPEQIMGKDVRLLRIKKEGSLDLALEGGVDSPIGKVVVSAVYERGAAERHGGIVKGDEIMAINGKIVTDYTLAEAEAALQKAWNQGGDWIDLVVAVCPPKEYDDELTFFXSPKGETKFTVRKQ

SEQ ID NO: 725 - protein, 140 aa, Homo Sapiens
  misc_feature (101)..(101): Xaa can be any naturally occurring amino acid
MSTGPTAATGSNRRLQQTQNQVDEVVDIMRVNVDKVLERDQKLSELDDRADALQAGASQFETSAAKLKRKYWWKNCKMWAIGITVLVIFIIIIIVWVVSSXRTSGTQNCCSRNLFKTFDLEPAILSSLPTVISKIFFVLM

SEQ ID NO: 726 - protein, 248 aa, Homo Sapiens
  misc_feature (208)..(208): Xaa can be any naturally occurring amino acid
MSPLLRRLLLAALLQLAPAQAPVSQPDAPGHQRKVVSWIDVYTRATCQPREVVVPLTVELMGTVAKQLVPSCVTVQRCGGCCPDDGLECVPTGQHQVRMQILMIRYPSSQLGEMSLEEHSQCECRPKKKDSAVKPDRAATPHHRPQPRSVPGWDSAPGAPSPADITHPTPAPGPSAHAAPSTTSALTPGPAAAAADAAASSVAKGGAXSSTQTPAGAGSCEGDTWLFRLSRVTCLRGYIPVGEQRGAW

SEQ ID NO: 727 - protein, 439 aa, Homo Sapiens
  misc_feature (420)..(420): Xaa can be any naturally occurring amino acid
MHLLGFFSVACSLLAAALLPGPREAPAAAAAFESGLDLSDAEPDAGEATAYASKDLEEQLRSVSSVDELMTVLYPEYWKMYKCQLRKGGWQHNREQANLNSRTEETIKFAAAHYNTEILKSIDNEWRKTQCMPREVCIDVGKEFGVATNTFFKPPCVSVYRCGGCCNSEGLQCMNTSTSYLSKTLFEITVPLSQGPKPVTISFANHTSCRCMSKLDVYRQVHSIIRRSLPATLPQCQAANKTCPTNYMWNNHICRCLAQEDFMFSSDAGDDSTDGFHDICGPNKELDEETCQCVCRAGLRPASCGPHKELDRNSCQCVCKNKLFPSQCGANREFDENTCQCVCKRTCPRNQPLNPGKCACECTESPQKCLLKGKKFHHQTCSCYRRPCTNRQKACEPGFSYSEEVCRCVPSYWKRPQMSXDCTVFQFIDFLLWKTVLPQ

SEQ ID NO: 728 - protein, 227 aa, Homo Sapiens
  misc_feature (214)..(214): Xaa can be any naturally occurring amino acid
MPRRAENWDEAEVGAEEAGVEEYGPEEDGGEESGAEESGPEESGPEELGAEEEMEAGRPRPVLRSVNSREPSQVIFCNRSPRVVLPVWLNFDGEPQPYPTLPPGTGRRIHSYRGHLWLFRDAGTHDGLLVNQTELFVPSLNVDGQPIFANITLPVYTLKERCLQVVRSLVKPENYRRLDIVRSLYEDLEDHPNVQKDLERLTQERIAHQRMGDXRFLLKLTLFHLSF

SEQ ID NO: 729 - protein, 685 aa, Homo Sapiens
  misc_feature (587)..(587): Xaa can be any naturally occurring amino acid
MPKPINVRVTTMDAELEFAIQPNTTGKQLFDQVVKTIGLREVWYFGLHYVDNKGFPTWLKLDKKVSAQEVRKENPLQFKFRAKFYPEDVAEELIQDITQKLFFLQVKEGILSDEIYCPPETAVLLGSYAVQAKFGDYNKEVHKSGYLSSERLIPQRVMDQHKLTRDQWEDRIQVWHAEHRGMLKDNAMLEYLKIAQDLEMYGINYFEIKNKKGTDLWLGVDALGLNIYEKDDKLTPKIGFPWSEIRNISFNDKKFVIKPIDKKAPDFVFYAPRLRINKRILQLCMGNHELYMRRRKPDTIEVQQMKAQAREEKHQKQLERQQLETEKKRRETVEREKEQMMREKEELMLRLQDYEEKTKKAERELSEQIQRALQLEEERKRAQEEAERLEADRMAALRAKEELERQAVDQIKSQEQLAAELAEYTAKIALLEEARRRKEDEVEEWQHRAKEAQDDLVKTKEELHLVMTAPPPPPPPVYEPVSYHVQESLQDEGAEPTGYSAELSSEGIRDDRNEEKRITEAEKNERVQRQLLTLSSELSQARDENKRTHNDIIHNENMRQGRDKYKTLRQIRQGNTKQRIDEFEALXQPGQDQGQRGAHSGRCQPRHACVFSAPSLGTPSDPSSFRKQLPNRNILGWEPGRRPGLFSPVVIVPSRPDSRDYSRITSCVVLGAGLIELRKMPVKSE

SEQ ID NO: 730 - protein, 382 aa, Homo Sapiens
  misc_feature (368)..(368): Xaa can be any naturally occurring amino acid
MRWFLPWTLAAVTAAAASTVLATALSPAPTTMDFTPAPLEDTSSRPQFCKWPCECPPSPPRCPLGVSLITDGCECCKMCAQQLGDNCTEAAICDPHRGLYCDYSGDRPRYAIGVCAQVVGVGCVLDGVRYNNGQSFQPNCKYNCTCIDGAVGCTPLCLRVRPPRLWCPHPRRVSIPGHCCEQWVCEDDAKRPRKTAPRDTGAFDAVGEVEAWHRNCIAYTSPWSPCSTSCGLGVSTRISNVNAQCWPEQESRLCNLRPCDVDIHTLIKAGKKCLAVYQPEASMNFTLAGCISTRSYQPKYCGVCMDNRCCIPYKSKTIDVSFQCPDGLGFSRQVLWINACFCNLSCRNPNDIFADLESYPDFSEIANXAGTNLGSWGLTQCL

SEQ ID NO: 731 - protein, 295 aa, Homo Sapiens
  misc_feature (281)..(281): Xaa can be any naturally occurring amino acid
MRWFLPWTLAAVTAAAASTVLATALSPAPTTMDFTPAPLEDTSSRPQFCKWPCECPPSPPRCPLGVSLITDGCECCKMCAQQLGDNCTEAAICDPHRGLYCDYSGDRPRYAIGVCAHAVGEVEAWHRNCIAYTSPWSPCSTSCGLGVSTRISNVNAQCWPEQESRLCNLRPCDVDIHTLIKAGKKCLAVYQPEASMNFTLAGCISTRSYQPKYCGVCMDNRCCIPYKSKTIDVSFQCPDGLGFSRQVLWINACFCNLSCRNPNDIFADLESYPDFSEIANXAGTNLGSWGLTQCL

SEQ ID NO: 732 - protein, 467 aa, Homo Sapiens
  misc_feature (371)..(371): Xaa can be any naturally occurring amino acid
MGLWALLPGWVSATLLLALAALPAALAANSSGRWWGIVNVASSTNLLTDSKSLQLVLEPSLQLLSRKQRRLIRQNPGILHSVSGGLQSAVRECKWQFRNRRWNCPTAPGPHLFGKIVNRGCRETAFIFAITSAGVTHSVARSCSEGSIESCTCDYRRRGPGGPDWHWGGCSDNIDFGRLFGREFVDSGEKGRDLRFLMNLHNNEAGRTTVFSEMRQECKCHGMSGSCTVRTCWMRLPTLRAVGDVLRDRFDGASRVLYGNRGSNRASRAELLRLEPEDPAHKPPSPHDLVYFEKSPNFCTYSGRLGTAGTAGRACNSSSPALDGCELLCCGRGHRTRTQRVTERCNCTFHWCCHVSCRNCTHTRVLHECLXGAARTRPQETLSSSPPPNRLASTQDPVIRPPEYLQSHSPRFIRIPSLPLPPTWGLLKPLAWGGMNPLAILMDLPRTYLPPSPRETPCCTAPCLARR

SEQ ID NO: 733 - protein, 420 aa, Homo Sapiens
  misc_feature (361)..(361): Xaa can be any naturally occurring amino acid
MNAPLGGIWLWLPLLLTWLTPEVNSSWWYMRATGGSSRVMCDNVPGLVSSQRQLCHRHPDVMRAISQGVAEWTAECQHQFRQHRWNCNTLDRDHSLFGRVLLRSSRESAFVYAISSAGVVFAITRACSQGEVKSCSCDPKKMGSAKDSKGIFDWGGCSDNIDYGIKFARAFVDAKERKGKDARALMNLHNNRAGRKAVKRFLKQECKCHGVSGSCTLRTCWLAMADFRKTGDYLWRKYNGAIQVVMNQDGTGFTVANERFKKPTKNDLVYFENSPDYCIRDREAGSLGTAGRVCNLTSRGMDSCEVMCCGRGYDTSHVTRMTKCGCKFHWCCAVRCQDCLEALDVHTCKAPKNADWTTATXPQQASPSTFPSTRTPLDLQEHWTFGFFLGGYFLRHVAFISTEAPSSSLGAPGWGATRCT

SEQ ID NO: 734 - protein, 1449 aa, Homo Sapiens
  misc_feature (1433)..(1433): Xaa can be any naturally occurring amino acid
MSEKKLETTAQQRKCPEWMNVQNKRCAVEERKACVRKSVFEDDLPFLEFTGSIVYSYDASDCSFLSEDISMSLSDGDVVGFDMEWPPLYNRGKLGKVALIQLCVSESKCYLFHVSSMSVFPQGLKMLLENKAVKKAGVGIEGDQWKLLRDFDIKLKNFVELTDVANKKLKCTETWSLNSLVKHLLGKQLLKDKSIRCSNWSKFPLTEDQKLYAATDAYAGFIIYRNLEILDDTVQRFAINKEEEILLSDMNKQLTSISEEVMDLAKHLPHAFSKLENPRRVSILLKDISENLYSLRRMIIGSTNIETELRPSNNLNLLSFEDSTTGGVQQKQIREHEVLIHVEDETWDPTLDHLAKHDGEDVLGNKVERKEDGFEDGVEDNKLKENMERACLMSLDITEHELQILEQQSQEEYLSDIAYKSTEHLSPNDNENDTSYVIESDEDLEMEMLKHLSPNDNENDTSYVIESDEDLEMEMLKSLENLNSGTVEPTHSKCLKMERNLGLPTKEEEEDDENEANEGEEDDDKDFLWPAPNEEQVTCLKMYFGHSSFKPVQWKVIHSVLEERRDNVAVMATGYGKSLCFQYPPVYVGKIGLVISPLISLMEDQVLQLKMSNIPACFLGSAQSENVLTDIKLGKYRIVYVTPEYCSGNMGLLQQLEADIGITLIAVDEAHCISEWGHDFRDSFRKLGSLKTALPMVPIVALTATASSSIREDIVRCLNLRNPQITCTGFDRPNLYLEVRRKTGNILQDLQPFLVKTSSHWEFEGPTIIYCPSRKMTQQVTGELRKLNLSCGTYHAGMSFSTRKDIHHRFVRDEIQCVIATIAFGMGINKADIRQVIHYGAPKDMESYYQEIGRAGRDGLQSSCHVLWAPADINLNRHLLTEIRNEKFRLYKLKMMAKMEKYLHSSRCRRQIILSHFEDKQVQKASLGIMGTEKCCDNCRSRLDHCYSMDDSEDTSWDFGPQAFKLLSAVDILGEKFGIGLPILFLRGSNSQRLADQYRRHSLFGTGKDQTESWWKAFSRQLITEGFLVEVSRYNKFMKICALTKKGRNWLHKANTESQSLILQANEELCPKKLLLPSSKTVSSGTKEHCYNQVPVELSTEKKSNLEKLYSYKPCDKISSGSNISKKSIMVQSPEKAYSSSQPVISAQEQETQIVLYGKLVEARQKHANKMDVPPAILATNKILVDMAKMRPTTVENVKRIDGVSEGKAAMLAPLLEVIKHFCQTNSVQTDLFSSTKPQEEQKTSLVAKNKICTLSQSMAITYSLFQEKKMPLKSIAESRILPLMTIGMHLSQAVKAGCPLDLERAGLTPEVQKIIADVIRNPPVNSDMSKISLIRMLVPENIDTYLIHMAIEILKHGPDSGLQPSCDVNKRRCFPGSEEICSSSKRSKEEVGINTETSSAERKRRLPVWFAKGSDTSKKLMDKTKRGGLFSXAGNYQNNYVSCCIIRG

SEQ ID NO: 735 - protein, 519 aa, Homo Sapiens
  misc_feature (498)..(498): Xaa can be any naturally occurring amino acid
MQDPASTCVPEPASQHTLRSGPGCLQQPEQQGVRDPGGIWAKLGAAEASAERLQGRRSRGASGSEPQQMGSDVRDLNALLPAVPSLGGGGGCALPVSGAAQWAPVLDFAPPGASAYGSLGGPAPPPAPPPPPPPPPHSFIKQEPSWGGAEPHEEQCLSAFTVHFSGQFTGTAGACRYGPFGPPPPSQASSGQARMFPNAPYLPSCLESQPAIRNQGYSTVTFDGTPSYGHTPSHHAAQFPNHSFKHEDPMGQQGSLGEQQYSVPPPVYGCHTPTDSCTGSQALLLRTPYSSDNLYQMTSQLECMTWNQMNLGATLKGHSTGYESDNHTTPILCGAQYRIHTHGVFRGIQDVRRVPGVAPTLVRSASETSEKRPFMCAYPGCNKRYFKLSHLQMHSRKHTGEKPYQCDFKDCERRFSRSDQLKRHQRRHTGVKPFQCKTCQRKFSRSDHLKTHTRTHTGEKPFSCRWPSCQKKFARSDELVRHHNMHQRNMTKLQLALXGVSLGDRSVSQAAQCVNCFQV

SEQ ID NO: 736 - protein, 387 aa, Homo Sapiens
  misc_feature (377)..(377): Xaa can be any naturally occurring amino acid
MVVVAAAPNPADGTPKVLLLSGQPASAAGAPAGQALPLMVPAQRGASPEAASGGLPQARKRQRLTHLSPEEKALRRKLKNRVAAQTARDRKKARMSELEQQVVDLEEENQKLLLENQLLREKTHGLVVENQELRQRLGMDALVAEEEAEAKGNEVRPVAGSAESAAGAGPVVTPPEHLPMDSGGIDSSDSESDILLGILDNLDPVMFFKCPSPEPASLEELPEVYPEGPSSLPASLSLSVGTSSAKLEAINELIRFDHIYTKPLVLEIPSETESQANVVVKIEEAPLSPSENDHPEFIVSVKEEPVEDDLVPELGISNLLSSSHCPKPSSCLLDAYSDCGYGGSLSPFSDMSSLLGVNHSWEDTFANELFPQLISVXGMIQYCCPFP

SEQ ID NO: 737 - protein, 272 aa, Homo Sapiens
  misc_feature (262)..(262): Xaa can be any naturally occurring amino acid
MVVVAAAPNPADGTPKVLLLSGQPASAAGAPAGQALPLMVPAQRGASPEAASGGLPQARKRQRLTHLSPEEKALRRKLKNRVAAQTARDRKKARMSELEQQVVDLEEENQKLLLENQLLREKTHGLVVENQELRQRLGMDALVAEEEAEAKGNEVRPVAGSAESAALRLRAPLQQVQAQLSPLQNISPWILAVLTLQIQSLISCWAFWTTWTQSCSSNALPQSLPAWRSSQRSTQKDPVPYQPPFLCQWGRHQPSWKPLMNXFVLTTYIPSP

SEQ ID NO: 738 - protein, 287 aa, Homo Sapiens
  misc_feature (274)..(274): Xaa can be any naturally occurring amino acid
MAAADGALPEAAALEQPAELPASVRASIERKRQRALMLRQARLAARPYSATAAAATGGMANVKAAPKIIDTGGGFILEEEEEEEQKIGKVVHQPGPVMEFDYVICEECGKEFMDSYLMNHFDLPTCDNCRDADDKHKLITKTEAKQEYLLKDCDLEKREPPLKFIVKKNPHHSQWGDMKLYLKLQIVKRSLEVWGSQEALEEAKEVRQENREKMKQKKFDKKVKELRRAVRSSVWKRETIVHQHEYGPEENLEDDMYRKTCTMCGHELTYEKMXFFSSVTCFIEFYI

SEQ ID NO: 739 - protein, 652 aa, Homo Sapiens
  misc_feature (634)..(634): Xaa can be any naturally occurring amino acid
MPEIRLRHVVSCSSQDSTHCAENLLKADTYRKWRAAKAGEKTISVVLQLEKEEQIHSVDIGNDGSAFVEVLVGSSAGGAGEQDYEVLLVTSSFMSPSESRSGSNPNRVRMFGPDKLVRAAAEKRWDRVKIVCSQPYSKDSPFGLSFVRFHSPPDKDEAEAPSQKVTVTKLGQFRVKEEDESANSLRPGALFFSRINKTSPVTASDPAGPSYAAATLQASSAASSASPVSRAIGSTSKPQESPKGKRKLDLNQEEKKTPSKPPAQLSPSVPKRPKLPAPTRTPATAPVPARAQGAVTGKPRGEGTEPRRPRAGPEELGKILQGVVVVLSGFQNPFRSELRDKALELGAKYRPDWTRDSTHLICAFANTPKYSQVLGLGGRIVRKEWVLDCHRMRRRLPSRRYLMAGPGSSSEEDEASHSGGSGDEAPKLPQKQPQTKTKPTQAAGPSSPQKPPTPEETKAASPVLQEDIDIEGVQSEGQDNGAEDSGDTEDELRRVAEQKEHRLPPGQEENGEDPYAGSTDENTDSEEHQEPPDLPVPELPDFFQGKHFFLYGEFPGDERRKLIRYVTAFNGELEDYMSDRVQFVITAQEWDPSFEEALMDNPSLAFVRPRWIYSCNEKQKLLPHQLYGVVPQAXSMCYTHTHTHTHTHTRCI

SEQ ID NO: 740 - protein, 284 aa, Homo Sapiens
  misc_feature (281)..(281): Xaa can be any naturally occurring amino acid
MCSAFHRAESGTELLARLEGRSSLKEIEPNLFADEDSPVHGDILEFHGPEGTGKTEMLYHLTARCILPKSEGGLEVEVLFIDTDYHFDMLRLVTILEHRLSQSSEEIIKYCLGRFFLVYCSSSTHLLLTLYSLESMFCSHPSLCLLILDSLSAFYWIDRVNGGESVNLQESTLRKCSQCLEKLVNDYRLVLFATTQTIMQKASSSSEEPSHASRRLCDVDIDYRPYLCKAWQQLVKHRMFFSKQDDSQSSNQFSLVSRCLKSNSLKKHFFIIGESGVEFCXYTS

SEQ ID NO: 741 - protein, 406 aa, Homo Sapiens
  misc_feature (347)..(347): Xaa can be any naturally occurring amino acid
MDLDLLDLNPRIIAAIKKAKLKSVKEVLHFSGPDLKRLTNLSSPEVWHLLRTASLHLRGSSILTALQLHQQKERFPTQHQRLSLGCPVLDALLRGGLPLDGITELAGRSSAGKTQLALQLCLAVQFPRQHGGLEAGAVYICTEDAFPHKRLQQLMAQQPRLRTDVPGELLQKLRFGSQIFIEHVADVDTLLECVNKKVPVLLSRGMARLVVIDSVAAPFRCEFDSQASAPRARHLQSLGATLRELSSAFQSPVLCINQVTEAMEEQGAAHGPLGFWDERVSPALGITWANQLLVRLLADRLREEEAALGCPARTLRVLSAPHLPPSSCSYTISAEGVRGTPGTQSHXHGGGCTTALPEKPRHTGLGPLKRVCLGRGTAGSLVQTQLFQGSGSTFSSEDGGHRLTPI

SEQ ID NO: 742 - protein, 343 aa, Homo Sapiens
  misc_feature (337)..(337): Xaa can be any naturally occurring amino acid
MERKISRIHLVSEPSITHFLQVSWEKTLESGFVITLTDGHSAWTGTVSESEISQEADDMAMEKGKYVGELRKALLSGAGPADVYTFNFSKESCYFFFEKNLKDVSFRLGSFNLEKVENPAEVIRELICYCLDTIAENQAKNEHLQKENERLLRDWNDVQGRFEKCVSAKEALETDLYKRFILVLNEKKTKIRSLHNKLLNAAQEREKDIKQEGETAICSEMTADRDPVYDESTDEESENQTDLSGLASAAVSKDDSIISSLDVTDIAPSRKRRQRMQRNLGTEPKMAPQENQLQEKENSRPDSSLPETSKKEHISAENMSLETLRNSSPEDLFDEIXQSQKIL

SEQ ID NO: 743 - protein, 341 aa, Homo Sapiens
  misc_feature (335)..(335): Xaa can be any naturally occurring amino acid
MERKISRIHLVSEPSITHFLQVSWEKTLESGFVITLTDGHSAWTGTVSESEISQEADDMAMEKGKYVGELRKALLSGAGPADVYTFNFSKESCYFFFEKNLKDVSFRLGSFNLEKVENPAEVIRELICYCLDTIAENQAKNEHLQKENERLLRDWNDVQGRFEKCVSAKEALETDLYKRFILVLNEKKTKIRSLHNKLLNAAQEREKDIKQEGETAICSEMTADRDPVYDESTDEESENQTDLSGLASAAVSKDDSIISSLDVTDIAPSRKRRQRMQRNLGTEPKMAPQENQLQEKEKPDSSLPETSKKEHISAENMSLETLRNSSPEDLFDEIXQSQKIL

SEQ ID NO: 744 - protein, 740 aa, Homo Sapiens
  misc_feature (733)..(733): Xaa can be any naturally occurring amino acid
MVRSGNKAAVVLCMDVGFTMSNSIPGIESPFEQAKKVITMFVQRQVFAENKDEIALVLFGTDGTDNPLSGGDQYQNITVHRHLMLPDFDLLEDIESKIQPGSQQADFLDALIVSMDVIQHETIGKKFEKRHIEIFTDLSSRFSKSQLDIIIHSLKKCDISLQFFLPFSLGKEDGSGDRGDGPFRLGGHGPSFPLKGITEQQKEGLEIVKMVMISLEGEDGLDEIYSFSESLRKLCVFKKIERHSIHWPCRLTIGSNLSIRIAAYKSILQERVKKTWTVVDAKTLKKEDIQKETVYCLNDDDETEVLKEDIIQGFRYGSDIVPFSKVDEEQMKYKSEGKCFSVLGFCKSSQVQRRFFMGNQVLKVFAARDDEAAAVALSSLIHALDDLDMVAIVRYAYDKRANPQVGVAFPHIKHNYECLVYVQLPFMEDLRQYMFSSLKNSKKYAPTEAQLNAVDALIDSMSLAKKDEKTDTLEDLFPTTKIPNPRFQRLFQCLLHRALHPREPLPPIQQHIWNMLNPPAEVTTKSQIPLSKIKTLFPLIEAKKKDQVTAQEIFQDNHEDGPTAKKLKTEQGGAHFSVSSLAEGSVTSVGSVNPAENFRVLVKQKKASFEEASNQLINHIEQFLDTNETPYFMKSIDCIRAFREEAIKFSEEQRFNNFLKALQEKVEIKQLNHFWEIVVQDGITLITKEEASGSSVTAEEAKKFLAPKDKPSGDTAAVFEEGGDVDDLLDMIXVVDVWGI

SEQ ID NO: 745 - protein, 638 aa, Homo Sapiens
  misc_feature (610)..(610): Xaa can be any naturally occurring amino acid
MSGWESYYKTEGDEEAEEEQEENLEASGDYKYSGRDSLIFLVDASKAMFESQSEDELTPFDMSIQCIQSVYISKIISSDRDLLAVVFYGTEKDKNSVNFKNIYVLQELDNPGAKRILELDQFKGQQGQKRFQDMMGHGSDYSLSEVLWVCANLFSDVQFKMSHKRIMLFTNEDNPHGNDSAKASRARTKAGDLRDTGIFLDLMHLKKPGGFDISLFYRDIISIAEDEDLRVHFEESSKLEDLLRKVRAKETRKRALSRLKLKLNKDIVISVGIYNLVQKALKPPPIKLYRETNEPVKTKTRTFNTSTGGLLLPSDTKRSQIYGSRQIILEKEETEELKRFDDPGLMLMGFKPLVLLKKHHYLRPSLFVYPEESLVIGSSTLFSALLIKCLEKEVAALCRYTPRRNIPPYFVALVPQEEELDDQKIQVTPPGFQLVFLPFADDKRKMPFTEKIMATPEQVGKMKAIVEKLRFTYRSDSFENPVLQQHFRNLEALALDLMEPEQAVDLTLPKVEAMNKRLGSLVDEFKELVYPPDYNPEGKVTKRKHDNEGSGSKRPKVEYSEEELKTHISKGTLGKFTVPMLKEACRAYGLKSGLKKQELLEALTKHFQDXPEAARPAALPQCGQAAWPCPQPVKMCFS

SEQ ID NO: 746 - protein, 336 aa, Homo Sapiens
  misc_feature (325)..(325): Xaa can be any naturally occurring amino acid
MSSEAETQQPPAAPPAAPALSAADTKPGTTGSGAGSGGPGGLTSAAPAGGDKKVIATKVLGTVKWFNVRNGYGFINRNDTKEDVFVHQTAIKKNNPRKYLRSVGDGETVEFDVVEGEKGAEAANVTGPGGVPVQGSKYAADRNHYRRYPRRRGPPRNYQQNYQNSESGEKNEGSESAPEGQAQQRRPYRRRRFPPYYMRRPYGRRPQYSNPPVQGEVMEGADNQGAGEQGRPVRQNMYRGYRPRFRRGPPRQRQPREDGNEEDKENQGDETQGQQPPQRRYRRNFNYRRRRPENPKPQDGKETKAADPPAENSSAPEAEQGGAEXMPAYHLYHHPV

SEQ ID NO: 747 - protein, 311 aa, Homo Sapiens
  misc_feature (247)..(247): Xaa can be any naturally occurring amino acid
MTMDKSELVQKAKLAEQAERYDDMAAAMKAVTEQGHELSNEERNLLSVAYKNVVGARRSSWRVISSIEQKTERNEKKQQMGKEYREKIEAELQDICNDVLELLDKYLIPNATQPESKVFYLKMKGDYFRYLSEVASGDNKQTTVSNSQQAYQEAFEISKKEMQPTHPIRLGLALNFSVFYYEILNSPEKACSLAKTAFDEAIAELDTLNEESYKDSTLIMQLLRDNLTLWTSENQGDEGDAGEGENXCFSCFVICSVSLCTLNIYPLCDKKKKKKKKRIVRRLSIFHSLSLGKMVHGINSWYLYLKLRLVT

SEQ ID NO: 748 - protein, 282 aa, Homo Sapiens
  misc_feature (256)..(256): Xaa can be any naturally occurring amino acid
MDDREDLVYQAKLAEQAERYDEMVESMKKVAGMDVELTVEERNLLSVAYKNVIGARRASWRIISSIEQKEENKGGEDKLKMIREYRQMVETELKLICCDILDVLDKHLIPAANTGESKVFYYKMKGDYHRYLAEFATGNDRKEAAENSLVAYKAASDIAMTELPPTHPIRLGLALNFSVFYYEILNSPDRACRLAKAAFDDAIAELDTLSEESYKDSTLIMQLLRDNLTLWTSDMQGDGEEQNKEALQDVEDENQXDISQQEKPSLTTPSSPSHPLETPHCH

SEQ ID NO: 749 - protein, 340 aa, Homo Sapiens
  misc_feature (247)..(247): Xaa can be any naturally occurring amino acid
MGDREQLLQRARLAEQAERYDDMASAMKAVTELNEPLSNEDRNLLSVAYKNVVGARRSSWRVISSIEQKTMADGNEKKLEKVKAYREKIEKELETVCNDVLSLLDKFLIKNCNDFQYESKVFYLKMKGDYYRYLAEVASGEKKNSVVEASEAAYKEAFEISKEQMQPTHPIRLGLALNFSVFYYEIQNAPEQACLLAKQAFDDAIAELDTLNEDSYKDSTLIMQLLRDNLTLWTSDQQDEEAGEGNXRSFRSPGPSFTHHPHHHRFFLATITKYLVLNLSVLAAQLLRSALLSLGKQFQINHGHCWTDGCFEPTGAPFLNCVEKCVLMRHFTMPVDLWEI

SEQ ID NO: 750 - protein, 692 aa, Homo Sapiens
  misc_feature (674)..(674): Xaa can be any naturally occurring amino acid
MDLTKMGMIQLQNPSHPTGLLCKANQMRLAGTLCDVVIMVDSQEFHAHRTVLACTSKMFEILFHRNSQHYTLDFLSPKTFQQILEYAYTATLQAKAEDLDDLLYAAEILEIEYLEEQCLKMLETIQASDDNDTEATMADGGAEEEEDRKARYLKNIFISKHSSEESGYASVAGQSLPGPMVDQSPSVSTSFGLSAMSPTKAAVDSLMTIGQSLLQGTLQPPAGPEEPTLAGGGRHPGVAEVKTEMMQVDEVPSQDSPGAAESSISGGMGDKVEERGKEGPGTPTRSSVITSARELHYGREESAEQVPPPAEAGQAPTGRPEHPAPPPEKHLGIYSVLPNHKADAVLSMPSSVTSGLHVQPALAVSMDFSTYGGLLPQGFIQRELFSKLGELAVGMKSESRTIGEQCSVCGVELPDNEAVEQHRKLHSGMKTYGCELCGKRFLDSLRLRMHLLAHSAGAKAFVCDQCGAQFSKEDALETHRQTHTGTDMAVFCLLCGKRFQAQSALQQHMEVHAGVRSYICSECNRTFPSHTALKRHLRSHTGDHPYECEFCGSCFRDESTLKSHKRIHTGEKPYECNGCGKKFSLKHQLETHYRVHTGEKPFECKLCHQRSRDYSAMIKHLRTHNGASPYQCTICTEYCPSLSSMQKHMKGHKPEEIPPDWRIEKTYLYLCYVXREARGGGAERGARKEELE

SEQ ID NO: 751 - protein, 1737 aa, Homo Sapiens
  misc_feature (1705)..(1705): Xaa can be any naturally occurring amino acid
MAVLRQLALLLWKNYTLQKRKVLVTVLELFLPLLFSGILIWLRLKIQSENVPNATIYPGQSIQELPLFFTFPPPGDTWELAYIPSHSDAAKTVTETVRRALVINMRVRGFPSEKDFEDYIRYDNCSSSVLAAVVFEHPFNHSKEPLPLAVKYHLRFSYTRRNYMWTQTGSFFLKETEGWHTTSLFPLFPNPGPREPTSPDGGEPGYIREGFLAVQHAVDRAIMEYHADAATRQLFQRLTVTIKRFPYPPFIADPFLVAIQYQLPLLLLLSFTYTALTIARAVVQEKERRLKEYMRMMGLSSWLHWSAWFLLFFLFLLIAASFMTLLFCVKVKPNVAVLSRSDPSLVLAFLLCFAISTISFSFMVSTFFSKANMAAAFGGFLYFFTYIPYFFVAPRYNWMTLSQKLCSCLLSNVAMAMGAQLIGKFEAKGMGIQWRDLLSPVNVDDDFCFGQVLGMLLLDSVLYGLVTWYMEAVFPGQFGVPQPWYFFIMPSYWCGKPRAVAGKEEEDSDPEKALRNEYFEAEPEDLVAGIKIKHLSKVFRVGNKDRAAVRDLNLNLYEGQITVLLGHNGAGKTTTLSMLTGLFPPTSGRAYISGYEISQDMVQIRKSLGLCPQHDILFDNLTVAEHLYFYAQLKGLSRQKCPEEVKQMLHIIGLEDKWNSRSRFLSGGMRRKLSIGIALIAGSKVLILDEPTSGMDAISRRAIWDLLQRQKSDRTIVLTTHFMDEADLLGDRIAIMAKGELQCCGSSLFLKQKYGAGYHMTLVKEPHCNPEDISQLVHHHVPNATLESSAGAELSFILPRESTHRFEGLFAKLEKKQKELGIASFGASITTMEEVFLRVGKLVDSSMDIQAIQLPALQYQHERRASDWAVDSNLCGAMDPSDGIGALIEEERTAVKLNTGLALHCQQFWAMFLKKAAYSWREWKMVAAQVLVPLTCVTLALLAINYSSELFDDPMLRLTLGEYGRTVVPFSVPGTSQLGQQLSEHLKDALQAEGQEPREVLGDLEEFLIFRASVEGGGFNERCLVAASFRDVGERTVVNALFNNQAYHSPATALAVVDNLLFKLLCGPHASIVVSNFPQPRSALQAAKDQFNEGRKGFDIALNLLFAMAFLASTFSILAVSERAVQAKHVQFVSGVHVASFWLSALLWDLISFLIPSLLLLVVFKAFDVRAFTRDGHMADTLLLLLLYGWAIIPLMYLMNFFFLGAATAYTRLTIFNILSGIATFLMVTIMRIPAVKLEELSKTLDHVFLVLPNHCLGMAVSSFYENYETRRYCTSSEVAAHYCKKYNIQYQENFYAWSAPGVGRFVASMAASGCAYLILLFLIETNLLQRLRGILCALRRRRTLTELYTRMPVLPEDQDVADERTRILAPSPDSLLHTPLIIKELSKVYEQRVPLLAVDRLSLAVQKGECFGLLGFNGAGKTTTFKMLTGEESLTSGDAFVGGHRISSDVGKVRQRIGYCPQFDALLDHMTGREMLVMYARLRGIPERHIGACVENTLRGLLLEPHANKLVRTYSGGNKRKLSTGIALIGEPAVIFLDEPSTGMDPVARRLLWDTVARARESGKAIIITSHSMEECEALCTRLAIMVQGQFKCLGSPQHLKSKFGSGYSLRAKVQSEGQQEALEEFKAFVDLTFPGSVLEDEHQGMVHYHLPGRDLSWAKVFGILEKAKEKYGVDDYSVSQISLEQVFLSFAHLQPPTAEEGRXGVAAVSPSGRDRTGKQGPSYILSLQVYLILYF

SEQ ID NO: 752 - protein, 2537 aa, Homo Sapiens
  misc_feature (2459)..(2459): Xaa can be any naturally occurring amino acid
MVLLLCLSCLIFSCLTFSWLKIWGKMTDSKPITKSKSEANLIPSQEPFPASDNSGETPQRNGEGHTLPKTPSQAEPASHKGPKDAGRRRNSLPPSHQKPPRNPLSSSDAAPSPELQANGTGTQGLEATDTNGLSSSARPQGQQAGSPSKEDKKQANIKRQLMTNFILGSFDDYSSDEDSVAGSSRESTRKGSRASLGALSLEAYLTTGEAETRVPTMRPSMSGLHLVKRGREHKKLDLHRDFTVASPAEFVTRFGGDRVIEKVLIANNGIAAVKCMRSIRRWAYEMFRNERAIRFVVMVTPEDLKANAEYIKMADHYVPVPGGPNNNNYANVELIVDIAKRIPVQAVWAGWGHASENPKLPELLCKNGVAFLGPPSEAMWALGDKIASTVVAQTLQVPTLPWSGSGLTVEWTEDDLQQGKRISVPEDVYDKGCVKDVDEGLEAAERIGFPLMIKASEGGGGKGIRKAESAEDFPILFRQVQSEIPGSPIFLMKLAQHARHLEVQILADQYGNAVSLFGRDCSIQRRHQKIVEEAPATIAPLAIFEFMEQCAIRLAKTVGYVSAGTVEYLYSQDGSFHFLELNPRLQVEHPCTEMIADVNLPAAQLQIAMGVPLHRLKDIRLLYGESPWGVTPISFETPSNPPLARGHVIAARITSENPDEGFKPSSGTVQELNFRSSKNVWGYFSVAATGGLHEFADSQFGHCFSWGENREEAISNMVVALKELSIRGDFRTTVEYLINLLETESFQNNDIDTGWLDYLIAEKVQAEKPDIMLGVVCGALNVADAMFRTCMTDFLHSLERGQVLPADSLLNLVDVELIYGGVKYILKVARQSLTMFVLIMNGCHIEIDAHRLNDGGLLLSYNGNSYTTYMKEEVDSYRITIGNKTCVFEKENDPTVLRSPSAGKLTQYTVEDGGHVEAGSSYAEMEVMKMIMTLNVQERGRVKYIKRPGAVLEAGCVVARLELDDPSKVHPAEPFTGELPAQQTLPILGEKLHQVFHSVLENLTNVMSGFCLPEPVFSIKLKEWVQKLMMTLRHPSLPLLELQEIMTSVAGRIPAPVEKSVRRVMAQYASNITSVLCQFPSQQIATILDCHAATLQRKADREVFFINTQSIVQLVQRYRSGIRGYMKTVVLDLLRRYLRVEHHFQQAHYDKCVINLREQFKPDMSQVLDCIFSHAQVAKKNQLVIMLIDELCGPDPSLSDELISILNELTQLSKSEHCKVALRARQILIASHLPSYELRHNQVESIFLSAIDMYGHQFCPENLKKLILSETTIFDVLPTFFYHANKVVCMASLEVYVRRGYIAYELNSLQHRQLPDGTCVVEFQFMLPSSHPNRMTVPISITNPDLLRHSTELFMDSGFSPLCQRMGAMVAFRRFEDFTRNFDEVISCFANVPKDTPLFSEARTSLYSEDDCKSLREEPIHILNVSIQCADHLEDEALVPILRTFVQSKKNILVDYGLRRITFLIAQEKEFPKFFTFRARDEFAEDRIYRHLEPALAFQLELNRMRNFDLTAVPCANHKMHLYLGAAKVKEGVEVTDHRFFIRAIIRHSDLITKEASFEYLQNEGERLLLEAMDELEVAFNNTSVRTDCNHIFLNFVPTVIMDPFKIEESVRYMVMRYGSRLWKLRVLQAEVKINIRQTTTGSAVPIRLFITNESGYYLDISLYKEVTDSRSGNIMFHSFGNKQGPQHGMLINTPYVTKDLLQAKRFQAQTLGTTYIYDFPEMFRQALFKLWGSPDKYPKDILTYTELVLDSQGQLVEMNRLPGGNEVGMVAFKMRFKTQEYPEGRDVIVIGNDITFRIGSFGPGEDLLYLRASEMARAEGIPKIYVAANSGARIGMAEEIKHMFHVAWVDPEDPHKGFKYLYLTPQDYTRISSLNSVHCKHIEEGGESRYMITDIIGKDDGLGVENLRGSGMIAGESSLAYEEIVTISLVTCRAIGIGAYLVRLGQRVIQVENSHIILTGASALNKVLGREVYTSNNQLGGVQIMHYNGVSHITVPDDFEGVYTILEWLSYMPKDNHSPVPIITPTDPIDREIEFLPSRAPYDPRWMLAGRPHPTLKGTWQSGFFDHGSFKEIMAPWAQTVVTGRARLGGIPVGVIAVETRTVEVAVPADPANLDSEAKIIQQAGQVWFPDSAYKTAQAVKDFNREKLPLMIFANWRGFSGGMKDMYDQVLKFGAYIVDGLRQYKQPILIYIPPYAELRGGSWVVIDATINPLCIEMYADKESRGGVLEPEGTVEIKFRKKDLIKSMRRIDPAYKKLMEQLGEPDLSDKDRKDLEGRLKAREDLLLPIYHQVAVQFADFHDTPGRMLEKGVISDILEWKTARTFLYWRLRRLLLEDQVKQEILQASGELSHVHIQSMLRRWFVETEGAVKAYLWDNNQVVVQWLEQHWQAGDGPRSTIRENITYLKHDSVLKTIRGLVEENPEVAVDCVIYLSQHISPAERAQVVHLLSTMDSPASTXPWPAQPLPGPRQKEPPRPTTRTPSADPEDLLLNKENPGHFCRAAGSELTPVLTKGPGVPLPNKNSLLSIAGKFILFCL

SEQ ID NO: 753 - protein, 433 aa, Homo Sapiens
  misc_feature (428)..(428): Xaa can be any naturally occurring amino acid
MAVLAALLRSGARSRSPLLRRLVQEIRYVERSYVSKPTLKEVVIVSATRTPIGSFLGSLSLLPATKLGSIAIQGAIEKAGIPKEEVKEAYMGNVLQGGEGQAPTRQAVLGAGLPISTPCTTINKVCASGMKAIMMASQSLMCGHQDVMVAGGMESMSNVPYVMNRGSTPYGGVKLEDLIVKDGLTDVYNKIHMGSCAENTAKKLNIARNEQDAYAINSYTRSKAAWEAGKFGNEVIPVTVTVKGQPDVVVKEDEEYKRVDFSKVPKLKTVFQKENGTVTAANASTLNDGAAALVLMTADAAKRLNVTPLARIVAFADAAVEPIDFPIAPVYAASMVLKDVGLKKEDIAMWEVNEAFSLVVLANIKMLEIDPQKVNINGGAVSLGHPIGMSGARIVGHLTHALKQGEYGLASICNGGGGASAMLIQKLXTTSAI

SEQ ID NO: 754 - protein, 1331 aa, Homo Sapiens
  misc_feature (1307)..(1307): Xaa can be any naturally occurring amino acid
MGAASGRRGPGLLLPLPLLLLLPPQPALALDPGLQPGNFSADEAGAQLFAQSYNSSAEQVLFQSVAASWAHDTNITAENARRQEEAALLSQEFAEAWGQKAKELYEPIWQNFTDPQLRRIIGAVRTLGSANLPLAKRQQYNALLSNMSRIYSTAKVCLPNKTATCWSLDPDLTNILASSRSYAMLLFAWEGWHNAAGIPLKPLYEDFTALSNEAYKQDGFTDTGAYWRSWYNSPTFEDDLEHLYQQLEPLYLNLHAFVRRALHRRYGDRYINLRGPIPAHLLGDMWAQSWENIYDMVVPFPDKPNLDVTSTMLQQGWNATHMFRVAEEFFTSLELSPMPPEFWEGSMLEKPADGREVVCHASAWDFYNRKDFRIKQCTRVTMDQLSTVHHEMGHIQYYLQYKDLPVSLRRGANPGFHEAIGDVLALSVSTPEHLHKIGLLDRVTNDTESDINYLLKMALEKIAFLPFGYLVDQWRWGVFSGRTPPSRYNFDWWYLRTKYQGICPPVTRNETHFDAGAKFHVPNVTPYIRYFVSFVLQFQFHEALCKEAGYEGPLHQCDIYRSTKAGAKLRKVLQAGSSRPWQEVLKDMVGLDALDAQPLLKYFQPVTQWLQEQNQQNGEVLGWPEYQWHPPLPDNYPEGIDLVTDEAEASKFVEEYDRTSQVVWNEYAEANWNYNTNITTETSKILLQKNMQIANHTLKYGTQARKFDVNQLQNTTIKRIIKKVQDLERAALPAQELEEYNKILLDMETTYSVATVCHPNGSCLQLEPDLTNVMATSRKYEDLLWAWEGWRDKAGRAILQFYPKYVELINQAARLNGYVDAGDSWRSMYETPSLEQDLERLFQELQPLYLNLHAYVRRALHRHYGAQHINLEGPIPAHLLGNMWAQTWSNIYDLVVPFPSAPSMDTTEAMLKQGWTPRRMFKEADDFFTSLGLLPVPPEFWNKSMLEKPTDGREVVCHASAWDFYNGKDFRIKQCTTVNLEDLVVAHHEMGHIQYFMQYKDLPVALREGANPGFHEAIGDVLALSVSTPKHLHSLNLLSSEGGSDEHDINFLMKMALDKIAFIPFSYLVDQWRWRVFDGSITKENYNQEWWSLRLKYQGLCPPVPRTQGDFDPGAKFHIPSSVPYIRYFVSFIIQFQFHEALCQAAGHTGPLHKCDIYQSKEAGQRLATAMKLGFSRPWPEAMQLITGQPNMSASAMLSYFKPLLDWLRTENELHGEKLGWPQYNWTPNSARSEGPLPDSGRVSFLGLDLDAQQARVGQWLLLFLGIALLVATLGLSQRLFSIRHRSLHRHSHGPQFGSEVELRHSXGDPAGSALPKGLPPETGMGTLVGS

SEQ ID NO: 755 - protein, 333 aa, Homo Sapiens
  misc_feature (326)..(326): Xaa can be any naturally occurring amino acid
MDMWTALLILQALLLPSLADGATPALRFVAVGDWGGVPNAPFHTAREMANAKEIARTVQILGADFILSLGDNFYFTGVQDINDKRFQETFEDVFSDRSLRKVPWYVLAGNHDHLGNVSAQIAYSKISKRWNFPSPFYRLHFKIPQTNVSVAIFMLDTVTLCGNSDDFLSQQPERPRDVKLARTQLSWLKKQLAAAREDYVLVAGHYPVWSIAEHGPTHCLVKQLRPLLATYGVTAYLCGHDHNLQYLQDENGVGYVLSGAGNFMDPSKRHQRKVPNGYLRFHYGTEDSLGGFAYVEISSKEMTVTYIEASGKSLFKTRLPRRARPXTPMTAQL

SEQ ID NO: 756 - protein, 382 aa, Homo Sapiens
  misc_feature (364)..(364): Xaa can be any naturally occurring amino acid
MAQTPAFDKPKVELHVHLDGSIKPETILYYGRRRGIALPANTAEGLLNVIGMDKPLTLPDFLAKFDYYMPAIAGCREAIKRIAYEFVEMKAKEGVVYVEVRYSPHLLANSKVEPIPWNQAEGDLTPDEVVALVGQGLQEGERDFGVKARSILCCMRHQPNWSPKVVELCKKYQQQTVVAIDLAGDETIPGSSLLPGHVQAYQEAVKSGIHRTVHAGEVGSAEVVKEAVDILKTERLGHGYHTLEDQALYNRLRQENMHFEICPWSSYLTGAWKPDTEHAVIRLKNDQANYSLNTDDPLIFKSTLDTDYQMTKRDMGFTEEEFKRLNINAAKSSFLPEDEKRELLDLLYKAYGMPPSASAGQNLXRRHSSKPSPCGVTPTLWG

SEQ ID NO: 757 - protein, 945 aa, Homo Sapiens
  misc_feature (907)..(907): Xaa can be any naturally occurring amino acid
MQAAVAVSVPFLLLCVLGTCPPARCGQAGDASLMELEKRKENRFVERQSIVPLRLIYRSGGEDESRHDALDTRVRGDLGGPQLTHVDQASFQVDAFGTSFILDVVLNHDLLSSEYIERHIEHGGKTVEVKGGEHCYYQGHIRGNPDSFVALSTCHGLHGMFYDGNHTYLIEPEENDTTQEDFHFHSVYKSRLFEFSLDDLPSEFQQVNITPSKFILKPRPKRSKRQLRRYPRNVEEETKYIELMIVNDHLMFKKHRLSVVHTNTYAKSVVNMADLIYKDQLKTRIVLVAMETWATDNKFAISENPLITLREFMKYRRDFIKEKSDAVHLFSGSQFESSRSGAAYIGGICSLLKGGGVNEFGKTDLMAVTLAQSLAHNIGIISDKRKLASGECKCEDTWSGCIMGDTGYYLPKKFTQCNIEEYHDFLNSGGGACLFNKPSKLLDPPECGNGFIETGEECDCGTPAECVLEGAECCKKCTLTQDSQCSDGLCCKKCKFQPMGTVCREAVNDCDIRETCSGNSSQCAPNIHKMDGYSCDGVQGICFGGRCKTRDRQCKYIWGQKVTASDKYCYEKLNIEGTEKGNCGKDKDTWIQCNKRDVLCGYLLCTNIGNIPRLGELDGEITSTLVVQQGRTLNCSGGHVKLEEDVDLGYVEDGTPCGPQMMCLEHRCLPVASFNFSTCLSSKEGTICSGNGVCSNELKCVCNRHWIGSDCNTYFPHNDDAKTGITLSGNGVAGTNIIIGIIAGTILVLALILGITAWGYKNYREQRQLPQGDYVKKPGDGDSFYSDIPPGVSTNSASSSKKRSNGLSHSWSERIPDTKHISDICENGRPRSNSWQGNLGGNKKKIRGKRFRPRSNSTETLSPAKSPSSSTGSIASSRKYPYPMPPLPDEDKKVNRQSARLWETSIXDQLFTCDTSKTVYFNFYRNPGSWNHCKSICSSDNTKTL

SEQ ID NO: 758 - protein, 1247 aa, Homo Sapiens
  misc_feature (1227)..(1227): Xaa can be any naturally occurring amino acid
MNPRQGYSLSGYYTHPFQGYEHRQLRYQQPGPGSSPSSFLLKQIEFLKGQLPEAPVIGKQTPSLPPSLPGLRPRFPVLLASSTRGRQVDIRGVPRGVHLGSQGLQRGFQHPSPRGRSLPQRGVDCLSSHFQELSIYQDQEQRILKFLEELGEGKATTAHDLSGKLGTPKKEINRVLYSLAKKGKLQKEAGTPPLWKIAVSTQAWNQHSGVVRPDGHSQGAPNSDPSLEPEDRNSTSVSEDLLEPFIAVSAQAWNQHSGVVRPDSHSQGSPNSDPGLEPEDSNSTSALEDPLEFLDMAEIKEKICDYLFNVSDSSALNLAKNIGLTKARDINAVLIDMERQGDVYRQGTTPPIWHLTDKKRERMQIKRNTNSVPETAPAAIPETKRNAEFLTCNIPTSNASNNMVTTEKVENGQEPVIKLENRQEARPEPARLKPPVHYNGPSKAGYVDFENGQWATDDIPDDLNSIRAAPGEFRAIMEMPSFYSHGLPRCSPYKKLTECQLKNPISGLLEYAQFASQTCEFNMIEQSGPPHEPRFKFQVVINGREFPPAEAGSKKVAKQDAAMKAMTILLEEAKAKDSGKSEESSHYSTEKESEKTAESQTPTPSATSFFSGKSPVTTLLECMHKLGNSCEFRLLSKEGPAHEPKFQYCVAVGAQTFPSVSAPSKKVAKQMAAEEAMKALHGEATNSMASDNQPEGMISESLDNLESMMPNKVRKIGELVRYLNTNPVGGLLEYARSHGFAAEFKLVDQSGPPHEPKFVYQAKVGGRWFPAVCAHSKKQGKQEAADAALRVLIGENEKAERMGFTEVTPVTGASLRRTMLLLSRSPEAQPKTLPLTGSTFHDQIAMLSHRCFNTLTNSFQPSLLGRKILAAIIMKKDSEDMGVVVSLGTGNRCVKGDSLSLKGETVNDCHAEIISRRGFIRFLYSELMKYNSQTAKDSIFEPAKGGEKLQIKKTVSFHLYISTAPCGDGALFDKSCSDRAMESTESRHYPVFENPKQGKLRTKVENGEGTIPVESSDIVPTWDGIRLGERLRTMSCSDKILRWNVLGLQGALLTHFLQPIYLKSVTLGYLFSQGHLTRAICCRVTRDGSAFEDGLRHPFIVNHPKVGRVSIYDSKRQSGKTKETSVNWCLADGYDLEILDGTRGTVDGPRNELSRVSKKNIFLLFKKLCSFRYRRDLLRLSYGEAKKAARDYETAKNYFKKGLKDMGYGNWISKPQEEKNFYLCPVXYAPVTDGLGCVILGCERGRS

SEQ ID NO: 759 - protein, 1172 aa, Homo Sapiens
  misc_feature (1145)..(1145): Xaa can be any naturally occurring amino acid
MPRNQGFSEPEYSAEYSAEYSVSLPSDPDRGVGRTHEISVRNSGSCLCLPRFMRLTFVPESLENLYQTYFKRQRHETLLVLVVFAALFDCYVVVMCAVVFSSDKLASLAVAGIGLVLDIILFVLCKKGLLPDRVTRRVLPYVLWLLITAQIFSYLGLNFARAHAASDTVGWQVFFVFSFFITLPLSLSPIVIISVVSCVVHTLVLGVTVAQQQQEELKGMQLLREILANVFLYLCAIAVGIMSYYMADRKHRKAFLEARQSLEVKMNLEEQSQQQENLMLSILPKHVADEMLKDMKKDESQKDQQQFNTMYMYRHENVSILFADIVGFTQLSSACSAQELVKLLNELFARFDKLAAKYHQLRIKILGDCYYCICGLPDYREDHAVCSILMGLAMVEAISYVREKTKTGVDMRVGVHTGTVLGGVLGQKRWQYDVWSTDVTVANKMEAGGIPGRVHISQSTMDCLKGEFDVEPGDGGSRCDYLEEKGIETYLIIASKPEVKKTATQNGLNGSALPNGAPASSKSSSPALIETKEPNGSAHSSGSTSEKPEEQDAQADNPSFPNPRRRLRLQDLADRVVDASEDEHELNQLLNEALLERESAQVVKKRNTFLLSMRFMDPEMETRYSVEKEKQSGAAFSCSCVVLLCTALVEILIDPWLMTNYVTFMVGEILLLILTICSLAAIFPRAFPKKLVAFSTWIDRTRWARNTWAMLAIFILVMANVVDMLSCLQYYTGPSNATAGMETEGSCLENPKYYNYVAVLSLIATIMLVQVSHMVKLTLMLLVAGAVATINLYAWRPVFDEYDHKRFREHDLPMVALEQMQGFNPGLNGTDRLPLVPSKYSMTVMVFLMMLSFYYFSRHVEKLARTLFLWKIEVHDQKERVYEMRRWNEALVTNMLPEHVARHFLGSKKRDEELYSQTYDEIGVMFASLPNFADFYTEESINNGGIECLRFLNEIISDFDSLLDNPKFRVITKIKTIGSTYMAASGVTPDVNTNGFASSNKEDKSERERWQHLADLADFALAMKDTLTNINNQSFNNFMLRIGMNKGGVLAGVIGARKPHYDIWGNTVNVASRMESTGVMGNIQVVEETQVILREYGFRFVRRGPIFVKGKGELLTFFLKGRDKLATFPNGPSVTLPHQVVDNSXMASSLQQSKPEGRIYFLKLKEVPTFLD

SEQ ID NO: 760 - protein, 274 aa, Homo Sapiens
  misc_feature (245)..(245): Xaa can be any naturally occurring amino acid
MLLLGAVLLLLALPGHDQETTTQGPGVLLPLPKGACTGWMAGIPGHPGHNGAPGRDGRDGTPGEKGEKGDPGLIGPKGDIGETGVPGAEGPRGFPGIQGRKGEPGEGAYVYRSAFSVGLETYVTIPNMPIRFTKIFYNQQNHYDGSTGKFHCNIPGLYYFAYHITVYMKDVKVSLFKKDKAMLFTYDQYQENNVDQASGSVLLHLEVGDQVWLQVYGEGERNGLYADNDNDSTFTGFLLYHDTNXSPLTQSLLQAKQPQSQLKAFSTVRKLIII

SEQ ID NO: 761 - protein, 577 aa, Homo Sapiens
  misc_feature (573)..(573): Xaa can be any naturally occurring amino acid
MTFRDLLSVSFEGPRPDSSAGGSSAGGGGGSAGGAAPSEGPAVGGVPGGAGGGGGVVGAGSGEDNRSSAGEPGSAGAGGDVNGTAAVGGLVVSAQGVGVGVFLAAFILMAVAGNLLVILSVACNRHLQTVTNYFIVNLAVADLLLSATVLPFSATMEVLGFWAFGRAFCDVWAAVDVLCCTASILSLCTISVDRYVGVRHSLKYPAIMTERKAAAILALLWVVALVVSVGPLLGWKEPVPPDERFCGITEEAGYAVFSSVCSFYLPMAVIVVMYCRVYVVARSTTRSLEAGVKRERGKASEVVLRIHCRGAATGADGAHGMRSAKGHTFRSSLSVRLLKFSREKKAAKTLAIVVGVFVLCWFPFFFVLPLGSLFPQLKPSEGVFKVIFWLGYFNSCVNPLIYPCSSREFKRAFLRLLRCQCRRRRRRRPLWRVYGHHWRASTSGLRQDCAPSSGDAPPGAPLALTALPDPDPEPPGTPEMQAPVASRRKPPSAFREWRLLGPFRRPTTQLRAKVSSLSHKIRAGGAQRAEAACAQRSEVEAVSLGVPHEVAEGATCQAYELADYSNLRETDIXGPQS

SEQ ID NO: 762 - protein, 829 aa, Homo Sapiens
  misc_feature (798)..(798): Xaa can be any naturally occurring amino acid
MAHRCLRLWGRGGCWPRGLQQLLVPGGVGPGEQPCLRTLYRFVTTQARASRNSLLTDIIAAYQRFCSRPPKGFGKYFPNGKNGKKASEPKEVMGEKKESKPAATTRSSGGGGGGGGKRGGKKDDSHWWSRFQKGDIPWDDKDFRMFFLWTALFWGGVMFYLLLKRSGREITWKDFVNNYLSKGVVDRLEVVNKRFVRVTFTPGKTPVDGQYVWFNIGSVDTFERNLETLQQELGIEGENRVPVVYIAESDGSFLLSMLPTVLIIAFLLYTIRRGPAGIGRTGRGMGGLFSVGETTAKVLKDEIDVKFKDVAGCEEAKLEIMEFVNFLKNPKQYQDLGAKIPKGAILTGPPGTGKTLLAKATAGEANVPFITVSGSEFLEMFVGVGPARVRDLFALARKNAPCILFIDEIDAVGRKRGRGNFGGQSEQENTLNQLLVEMDGFNTTTNVVILAGTNRPDILDPALLRPGRFDRQIFIGPPDIKGRASIFKVHLRPLKLDSTLEKDKLARKLASLTPGFSGADVANVCNEAALIAARHLSDSINQKHFEQAIERVIGGLEKKTQVLQPEEKKTVAYHEAGHAVAGWYLEHADPLLKVSIIPRGKGLGYAQYLPKEQYLYTKEQLLDRMCMTLGGRASEEIFFGRITTGAQDDLRKVTQSAYAQIVQFGMNEKVGQISFDLPRQGDMVLEKPYSEATARLIDDEVRILINDAYKRTVALLTEKKADVEKVALLLLEKEVLDKNDMVELLGPRPFAEKSTYEEFVEGTGSLDEDTSLPEGLKDWNKEREKEKEEPPGEKVANXRPRGRPSQSLHCGFSWCIISAVAFRRMGMLR

SEQ ID NO: 763 - protein, 630 aa, Homo Sapiens
  misc_feature (600)..(600): Xaa can be any naturally occurring amino acid
MKLLKLTGFIFFLFFLTESLTLPTQPRDIENFNSTQKFIEDNIEYITIIAFAQYVQEATFEEMEKLVKDMVEYKDRCMADKTLPECSKLPNNVLQEKICAMEGLPQKHNFSHCCSKVDAQRRLCFFYNKKSDVGFLPPFPTLDPEEKCQAYESNRESLLNHFLYEVARRNPFVFAPTLLTVAVHFEEVAKSCCEEQNKVNCLQTRAIPVTQYLKAFSSYQKHVCGALLKFGTKVVHFIYIAILSQKFPKIEFKELISLVEDVSSNYDGCCEGDVVQCIRDTSKVMNHICSKQDSISSKIKECCEKKIPERGQCIINSNKDDRPKDLSLREGKFTDSENVCQERDADPDTFFAKFTFEYSRRHPDLSIPELLRIVQIYKDLLRNCCNTENPPGCYRYAEDKFNETTEKSLKMVQQECKHFQNLGKDGLKYHYLIRLTKIAPQLSTEELVSLGEKMVTAFTTCCTLSEEFACVDNLADLVFGELCGVNENRTINPAVDHCCKTNFAFRRPCFESLKADKTYVPPPFSQDLFTFHADMCQSQNEELQRKTDRFLVNLVKLKHELTDEELQSLFTNFANVVDKCCKAESPEVCFNEESPKIGNXSQLLEICKEKSTKGKASYLCGDESHFLRTK

SEQ ID NO: 764 - protein, 1590 aa, Homo Sapiens
  misc_feature (1533)..(1533): Xaa can be any naturally occurring amino acid
MGHSKQIRILLLNEMEKLEKTLFRLEQGYELQFRLGPTLQGKAVTVYTNYPFPGETFNREKFRSLDWENPTEREDDSDKYCKLNLQQSGSFQYYFLQGNEKSGGGYIVVDPILRVGADNHVLPLDCVTLQTFLAKCLGPFDEWESRLRVAKESGYNMIHFTPLQTLGLSRSCYSLANQLELNPDFSRPNRKYTWNDVGQLVEKLKKEWNVICITDVVYNHTAANSKWIQEHPECAYNLVNSPHLKPAWVLDRALWRFSCDVAEGKYKEKGIPALIENDHHMNSIRKIIWEDIFPKLKLWEFFQVDVNKAVEQFRRLLTQENRRVTKSDPNQHLTIIQDPEYRRFGCTVDMNIALTTFIPHDKGPAAIEECCNWFHKRMEELNSEKHRLINYHQEQAVNCLLGNVFYERLAGHGPKLGPVTRKHPLVTRYFTFPFEEIDFSMEESMIHLPNKACFLMAHNGWVMGDDPLRNFAEPGSEVYLRRELICWGDSVKLRYGNKPEDCPYLWAHMKKYTEITATYFQGVRLDNCHSTPLHVAEYMLDAARNLQPNLYVVAELFTGSEDLDNVFVTRLGISSLIREAMSAYNSHEEGRLVYRYGGEPVGSFVQPCLRPLMPAIAHALFMDITHDNECPIVHRSAYDALPSTTIVSMACCASGSTRGYDELVPHQISVVSEERFYTKWNPEALPSNTGEVNFQSGIIAARCAISKLHQELGAKGFIQVYVDQVDEDIVAVTRHSPSIHQSVVAVSRTAFRNPKTSFYSKEVPQMCIPGKIEEVVLEARTIERNTKPYRKDENSINGTPDITVEIREHIQLNESKIVKQAGVATKGPNEYIQEIEFENLSPGSVIIFRVSLDPHAQVAVGILRNHLTQFSPHFKSGSLAVDNADPILKIPFASLASRLTLAELNQILYRCESEEKEDGGGCYDIPNWSALKYAGLQGLMSVLAEIRPKNDLGHPFCNNLRSGDWMIDYVSNRLISRSGTIAEVGKWLQAMFFYLKQIPRYLIPCYFDAILIGAYTTLLDTAWKQMSSFVQNGSTFVKHLSLGSVQLCGVGKFPSLPILSPALMDVPYRLNEITKEKEQCCVSLAAGLPHFSSGIFRCWGRDTFIALRGILLITGRYVEARNIILAFAGTLRHGLIPNLLGEGIYARYNCRDAVWWWLQCIQDYCKMVPNGLDILKCPVSRMYPTDDSAPLPAGTLDQPLFEVIQEAMQKHMQGIQFRERNAGPQIDRNMKDEGFNITAGVDEETGFVYGGNRFNCGTWMDKMGESDRARNRGIPATPRDGSAVEIVGLSKSAVRWLLELSKKNIFPYHEVTVKRHGKAIKVSYDEWNRKIQDNFEKLFHVSEDPSDLNEKHPNLVHKRGIYKDSYGASSPWCDYQLRPNFTIAMVVAPELFTTEKAWKALEIAEKKLLGPLGMKTLDPDDMVYCGIYDNALDNDNYNLAKGFNYHQGPEWLWPIGYFLRAKLYFSRLMGPETTAKTIVLVKNVLSRHYVHLERSPWKGLPELTNENAQYCPFSCETQAWSIATILETLYDLXFITDIKYAITCIIGCKVIICKCLICTGSSCFKNLIYYNIDAQLGKIVKALIFFNVQR

SEQ ID NO: 765 - protein, 149 aa, Homo Sapiens
  misc_feature (133)..(133): Xaa can be any naturally occurring amino acid
MLTAAVLSCALLLALPATRGAQMGLAPMEGIRRPDQALLPELPGLGLRAPLKKTTAEQAEEDLLQEAQALAEVLDLQDREPRSSRRCVRLHESCLGQQVPCCDPCATCYCRFFNAFCYCRKLGTAMNPCSRTXLANVRVGARVGARKLE

SEQ ID NO: 766 - protein, 510 aa, Homo Sapiens
  misc_feature (486)..(486): Xaa can be any naturally occurring amino acid
MRKRAPQSEMAPAGVSLRATILCLLAWAGLAAGDRVYIHPFHLVIHNESTCEQLAKANAGKPKDPTFIPAPIQAKTSPVDEKALQDQLVLVAAKLDTEDKLRAAMVGMLANFLGFRIYGMHSELWGVVHGATVLSPTAVFGTLASLYLGALDHTADRLQAILGVPWKDKNCTSRLDAHKVLSALQAVQGLLVAQGRADSQAQLLLSTVVGVFTAPGLHLKQPFVQGLALYTPVVLPRSLDFTELDVAAEKIDRFMQAVTGWKTGCSLMGASVDSTLAFNTYVHFQGKMKGFSLLAEPQEFWVDNSTSVSVPMLSGMGTFQHWSDIQDNFSVTQVPFTESACLLLIQPHYASDLDKVEGLTFQQNSLNWMKKLSPRTIHLTMPQLVLQGSYDLQDLLAQAELPAILHTELNLQKLSNDRIRVGEVLNSIFFELEADEREPTESTQQLNKPEVLEVTLNRPFLFAVYDQSATALHFLGRVANPLSTAXGQGPRTQCLARPLPLAFEAKASSR

SEQ ID NO: 767 - protein, 477 aa, Homo Sapiens
  misc_feature (433)..(433): Xaa can be any naturally occurring amino acid
MSDKLPYKVADIGLAAWGRKALDIAENEMPGLMRMRERYSASKPLKGARIAGCLHMTVETAVLIETLVTLGAEVQWSSCNIFSTQDHAAAAIAKAGIPVYAWKGETDEEYLWCIEQTLYFKDGPLNMILDDGGDLTNLIHTKYPQLLPGIRGISEETTTGVHNLYKMMANGILKVPAINVNDSVTKSKFDNLYGCRESLIDGIKRATDVMIAGKVAVVAGYGDVGKGCAQALRGFGARVIITEIDPINALQAAMEGYEVTTMDEACQEGNIFVTTTGCIDIILGRHFEQMKDDAIVCNIGHFDVEIDVKWLNENAVEKVNIKPQVDRYRLKNGRRIILLAEGRLVNLGCAMGHPSFVMSNSFTNQVMAQIELWTHPDKYPVGVHFLPKKLDEAVAEAHLGKLNVKLTKLTEKQAQYLGMSCDGPFKPDHYRYXEPGLRFTLQLLSLPRPHLSSLRANGTNFVTGLSVSPIDSLGLIT

SEQ ID NO: 768 - protein, 666 aa, Homo Sapiens
  misc_feature (663)..(663): Xaa can be any naturally occurring amino acid
MRGAGPSPRQSPRTLRPDPGPAMSFFRRKVKGKEQEKTSDVKSIKASISVHSPQKSTKNHALLEAAGPSHVAINAISANMDSFSSSRTATLKKQPSHMEAAHFGDLGRSCLDYQTQETKSSLSKTLEQVLHDTIVLPYFIQFMELRRMEHLVKFWLEAESFHSTTWSRIRAHSLNTVKQSSLAEPVSPSKKHETTASFLTDSLDKRLEDSGSAQLFMTHSEGIDLNNRTNSTQNHLLLSQECDSAHSLRLEMARAGTHQVSMETQESSSTLTVASRNSPASPLKELSGKLMKSIEQDAVNTFTKYISPDAAKPIPITEAMRNDIIARICGEDGQVDPNCFVLAQSIVFSAMEQEHFSEFLRSHHFCKYQIEVLTSGTVYLADILFCESALFYFSEYMEKEDAVNILQFWLAADNFQSQLAAKKGQYDGQEAQNDAMILYDKYFSLQATHPLGFDDVVRLEIESNICREGGPLPNCFTTPLRQAWTTMEKVFLPGFLSSNLYYKYLNDLIHSVRGDEFLGGNVSLTAPGSVGPPDESHPGSSDSSASQSSVKKASIKILKNFDEAIIVDAASLDPESLYQRTYAGKMTFGRVSDLGQFIRESEPEPDVRKSKGSMFSQAMKKWVQGNTDEAQEELAWKIAKMIVSDIMQQAQYDQPLEKSTKLXLKT

SEQ ID NO: 769 - protein, 2866 aa, Homo Sapiens
  misc_feature (2814)..(2814): Xaa can be any naturally occurring amino acid
MKLNPQQAPLYGDCVVTVLLAEEDKAEDDVVFYLVFLGSTLRHCTSTRKVSSDTLETIAPGHDCCETVKVQLCASKEGLPVFVVAEEDFHFVQDEAYDAAQFLATSAGNQQALNFTRFLDQSGPPSGDVNSLDKKLVLAFRHLKLPTEWNVLGTDQSLHDAGPRETLMHFAVRLGLLRLTWFLLQKPGGRGALSIHNQEGATPVSLALERGYHKLHQLLTEENAGEPDSWSSLSYEIPYGDCSVRHHRELDIYTLTSESDSHHEHPFPGDGCTGPIFKLMNIQQQLMKTNLKQMDSLMPLMMTAQDPSSAPETDGQFLPCAPEPTDPQRLSSSEETESTQCCPGSPVAQTESPCDLSSIVEEENTDRSCRKKNKGVERKGEEVEPAPIVDSGTVSDQDSCLQSLPDCGVKGTEGLSSCGNRNEETGTKSSGMPTDQESLSSGDAVLQRDLVMEPGTAQYSSGGELGGISTTNVSTPDTAGEMEHGLMNPDATVWKNVLQGGESTKERFENSNIGTAGASDVHVTSKPVDKISVPNCAPAASSLDGNKPAESSLAFSNEETSTEKTAETETSRSREESADAPVDQNSVVIPAAAKDKISDGLEPYTLLAAGIGEAMSPSDLALLGLEEDVMPHQNSETNSSHAQSQKGKSSPICSTTGDDKLCADSACQQNTVTSSGDLVAKLCDNIVSESESTTARQPSSQDPPDASHCEDPQAHTVTSDPVRDTQERADFCPFKVVDNKGQRKDVKLDKPLTNMLEVVSHPHPVVPKMEKELVPDQAVISDSTFSLANSPGSESVTKDDALSFVPSQKEKGTATPELHTATDYRDGPDGNSNEPDTRPLEDRAVGLSTSSTAAELQHGMGNTSLTGLGGEHEGPAPPAIPEALNIKGNTDSSLQSVGKATLALDSVLTEEGKLLVVSESSAAQEQDKDKAVTCSSIKENALSSGTLQEEQRTPPPGQDTQQFHEKSISADCAKDKALQLSNSPGASSAFLKAETEHNKEVAPQVSLLTQGGAAQSLVPPGASLATESRQEALGAEHNSSALLPCLLPDGSDGSDALNCSQPSPLDVGVKNTQSQGKTSACEVSGDVTVDVTGVNALQGMAEPRRENISHNTQDILIPNVLLSQEKNAVLGLPVALQDKAVTDPQGVGTPEMIPLDWEKGKLEGADHSCTMGDAEEAQIDDEAHPVLLQPVAKELPTDMELSAHDDGAPAGVREVMRAPPSGRERSTPSLPCMVSAQDAPLPKGADLIEEAASRIVDAVIEQVKAAGALLTEGEACHMSLSSPELGPLTKGLESAFTEKVSTFPPGESLPMGSTPEEATGSLAGCFAGREEPEKIILPVQGPEPAAEMPDVKAEDEVDFRASSISEEVAVGSIAATLKMKQGPMTQAINRENWCTIEPCPDAASLLASKQSPECENFLDVGLGRECTSKQGVLKRESGSDSDLFHSPSDDMDSIIFPKPEEEHLACDITGSSSSTDDTASLDRHSSHGSDVSLSQILKPNRSRDRQSLDGFYSHGMGAEGRESESEPADPGDVEEEEMDSITEVPANCSVLRSSMRSLSPFRRHSWGPGKNAASDAEMNHRSSMRVLGDVVRRPPIHRRSFSLEGLTGGAGVGNKPSSSLEVSSANAEELRHPFSGEERVDSLVSLSEEDLESDQREHRMFDQQICHRSKQQGFNYCTSAISSPLTKSISLMTISHPGLDNSRPFHSTFHNTSANLTESITEENYNFLPHSPSKKDSEWKSGTKVSRTFSYIKNKMSSSKKSKEKEKEKDKIKEKEKDSKDKEKDKKTVNGHTFSSIPVVGPISCSQCMKPFTNKDAYTCANCSAFVHKGCRESLASCAKVKMKQPKGSLQAHDTSSLPTVIMRNKPSQPKERPRSAVLLVDETATTPIFANRRSQQSVSLSKSVSIQNITGVGNDENMSNTWKFLSHSTDSLNKISKVNESTESLTDEGVGTDMNEGQLLGDFEIESKQLEAESWSRIIDSKFLKQQKKDVVKRQEVIYELMQTEFHHVRTLKIMSGVYSQGMMADLLFEQQMVEKLFPCLDELISIHSQFFQRILERKKESLVDKSEKNFLIKRIGDVLVNQFSGENAERLKKTYGKFCGQHNQSVNYFKDLYAKDKRFQAFVKKKMSSSVVRRLGIPECILLVTQRITKYPVLFQRILQCTKDNEVEQEDLAQSLSLVKDVIGAVDSKVASYEKKVRLNEIYTKTDSKSIMRMKSGQMFAKEDLKRKKLVRDGSVFLKNAAGRLKEVQAVLLTDILVFLQEKDQKYIFASLDQKSTVISLKKLIVREVAHEEKGLFLISMGMTDPEMVEVHASSKEERNSWIQIIQDTINTLNRDEDEGIPSENEEEKKMLDTRARELKEQLHQKDQKILLLLEEKEMIFRDMAECSTPLPEDCSPTHSPRVLFRSNTEEALKGGPLMKSAINEVEILQGLVSGNLGGTLGPTVSSPIEQDVVGPVSLPRRAETFGGFDSHQMNASKGGEKEEGDDGQDLRRTESDSGLKKGGNANLVFMLKRNSEQVVQSVVHLYELLSALQGVVLQQDSYIEDQKLVLSERALTRSLSRPSSLIEQEKQRSLEKQRQDLANLQKQQAQYLEEKRRREREWEARERELREREALLAQREEEVQQGQQDLEKEREELQQKKGTYQYDLERLRAAQKQLEREQEQLRREAERLSQRQTERDLCQVSHPHTKLMRIPSFFPSPEEPPSPSAPSIAKSGSLDSELSVSPKRNSISRTHKDKGPFHILSSTSQTNKGPEGQSQAPASTSASTRLFGLTKPKEKKEKKKKNKTSRSQPGDGPASEVSAEGEEIFCXPSSSLLRQLPPDPGQPTSPAVPACTSLLHWTPTAPQRPVLLGGPRSWTISNR

SEQ ID NO: 770 - protein, 2870 aa, Homo Sapiens
  misc_feature (2818)..(2818): Xaa can be any naturally occurring amino acid
MKLNPQQAPLYGDCVVTVLLAEEDKAEDDVVFYLVFLGSTLRHCTSTRKVSSDTLETIAPGHDCCETVKVQLCASKEGLPVFVVAEEDFHFVQDEAYDAAQFLATSAGNQQALNFTRFLDQSGPPSGDVNSLDKKLVLAFRHLKLPTEWNVLGTDQSLHDAGPRETLMHFAVRLGLLRLTWFLLQKPGGRGALSIHNQEGATPVSLALERGYHKLHQLLTEENAGEPDSWSSLSYEIPYGDCSVRHHRELDIYTLTSESDSHHEHPFPGDGCTGPIFKLMNIQQQLMKTNLKQMDSLMPLMMTAQDPSSAPETDGQFLPCAPEPTDPQRLSSSEETESTQCCPGSPVAQTESPCDLSSIVEEENTDRSCRKKNKGVERKGEEVEPAPIVDSGTVSDQDSCLQSLPDCGVKGTEGLSSCGNRNEETGTKSSGMPTDQESLSSGDAVLQRDLVMEPGTAQYSSGGELGGISTTNVSTPDTAGEMEHGLMNPDATVWKNVLQGGESTKERFENSNIGTAGASDVHVTSKPVDKISVPNCAPAASSLDGNKPAESSLAFSNEETSTEKTAETETSRSREESADAPVDQNSVVIPAAAKDKISDGLEPYTLLAAGIGEAMSPSDLALLGLEEDVMPHQNSETNSSHAQSQKGKSSPICSTTGDDKLCADSACQQNTVTSSGDLVAKLCDNIVSESESTTARQPSSQDPPDASHCEDPQAHTVTSDPVRDTQERADFCPFKVVDNKGQRKDVKLDKPLTNMLEVVSHPHPVVPKMEKELVPDQAVISDSTFSLANSPGSESVTKDDALSFVPSQKEKGTATPELHTATDYRDGPDGNSNEPDTRPLEDRAVGLSTSSTAAELQHGMGNTSLTGLGGEHEGPAPPAIPEALNIKGNTDSSLQSVGKATLALDSVLTEEGKLLVVSESSAAQEQDKDKAVTCSSIKENALSSGTLQEEQRTPPPGQDTQQFHEKSISADCAKDKALQLSNSPGASSAFLKAETEHNKEVAPQVSLLTQGGAAQSLVPPGASLATESRQEALGAEHNSSALLPCLLPDGSDGSDALNCSQPSPLDVGVKNTQSQGKTSACEVSGDVTVDVTGVNALQGMAEPRRENISHNTQDILIPNVLLSQEKNAVLGLPVALQDKAVTDPQGVGTPEMIPLDWEKGKLEGADHSCTMGDAEEAQIDDEAHPVLLQPVAKELPTDMELSAHDDGAPAGVREVMRAPPSGRERSTPSLPCMVSAQDAPLPKGADLIEEAASRIVDAVIEQVKAAGALLTEGEACHMSLSSPELGPLTKGLESAFTEKVSTFPPGESLPMGSTPEEATGSLAGCFAGREEPEKIILPVQGPEPAAEMPDVKAEDEVDFRASSISEEVAVGSIAATLKMKQGPMTQAINRENWCTIEPCPDAASLLASKQSPECENFLDVGLGRECTSKQGVLKRESGSDSDLFHSPSDDMDSIIFPKPEEEHLACDITGSSSSTDDTASLDRHSSHGSDVSLSQILKPNRSRDRQSLDGFYSHGMGAEGRESESEPADPGDVEEEEMDSITEVPANCSVLRSSMRSLSPFRRHSWGPGKNAASDAEMNHRSMSWCPSGVQYSAGLSADFNYRSFSLEGLTGGAGVGNKPSSSLEVSSANAEELRHPFSGEERVDSLVSLSEEDLESDQREHRMFDQQICHRSKQQGFNYCTSAISSPLTKSISLMTISHPGLDNSRPFHSTFHNTSANLTESITEENYNFLPHSPSKKDSEWKSGTKVSRTFSYIKNKMSSSKKSKEKEKEKDKIKEKEKDSKDKEKDKKTVNGHTFSSIPVVGPISCSQCMKPFTNKDAYTCANCSAFVHKGCRESLASCAKVKMKQPKGSLQAHDTSSLPTVIMRNKPSQPKERPRSAVLLVDETATTPIFANRRSQQSVSLSKSVSIQNITGVGNDENMSNTWKFLSHSTDSLNKISKVNESTESLTDEGVGTDMNEGQLLGDFEIESKQLEAESWSRIIDSKFLKQQKKDVVKRQEVIYELMQTEFHHVRTLKIMSGVYSQGMMADLLFEQQMVEKLFPCLDELISIHSQFFQRILERKKESLVDKSEKNFLIKRIGDVLVNQFSGENAERLKKTYGKFCGQHNQSVNYFKDLYAKDKRFQAFVKKKMSSSVVRRLGIPECILLVTQRITKYPVLFQRILQCTKDNEVEQEDLAQSLSLVKDVIGAVDSKVASYEKKVRLNEIYTKTDSKSIMRMKSGQMFAKEDLKRKKLVRDGSVFLKNAAGRLKEVQAVLLTDILVFLQEKDQKYIFASLDQKSTVISLKKLIVREVAHEEKGLFLISMGMTDPEMVEVHASSKEERNSWIQIIQDTINTLNRDEDEGIPSENEEEKKMLDTRARELKEQLHQKDQKILLLLEEKEMIFRDMAECSTPLPEDCSPTHSPRVLFRSNTEEALKGGPLMKSAINEVEILQGLVSGNLGGTLGPTVSSPIEQDVVGPVSLPRRAETFGGFDSHQMNASKGGEKEEGDDGQDLRRTESDSGLKKGGNANLVFMLKRNSEQVVQSVVHLYELLSALQGVVLQQDSYIEDQKLVLSERALTRSLSRPSSLIEQEKQRSLEKQRQDLANLQKQQAQYLEEKRRREREWEARERELREREALLAQREEEVQQGQQDLEKEREELQQKKGTYQYDLERLRAAQKQLEREQEQLRREAERLSQRQTERDLCQVSHPHTKLMRIPSFFPSPEEPPSPSAPSIAKSGSLDSELSVSPKRNSISRTHKDKGPFHILSSTSQTNKGPEGQSQAPASTSASTRLFGLTKPKEKKEKKKKNKTSRSQPGDGPASEVSAEGEEIFCXPSSSLLRQLPPDPGQPTSPAVPACTSLLHWTPTAPQRPVLLGGPRSWTISNR

SEQ ID NO: 771 - protein, 3935 aa, Homo Sapiens
  misc_feature (3908)..(3908): Xaa can be any naturally occurring amino acid
MEDEERQKKLEAGKAKLAQFRQRKAQSDGQSPSKKQKKKRKTSSSKHDVSAHHDLNIDQSQCNEMYINSSQRVESTVIPESTIMRTLHSGEITSHEQGFSVELESEISTTADDCSSEVNGCSFVMRTGKPTNLLREEEFGVDDSYSEQGAQDSPTHLEMMESELAGKQHEIEELNRELEEMRVTYGTEGLQQLQEFEAAIKQRDGIITQLTANLQQARREKDETMREFLELTEQSQKLQIQFQQLQASETLRNSTHSSTAADLLQAKQQILTHQQQLEEQDHLLEDYQKKKEDFTMQISFLQEKIKVYEMEQDKKVENSNKEEIQEKETIIEELNTKIIEEEKKTLELKDKLTTADKLLGELQEQIVQKNQEIKNMKLELTNSKQKERQSSEEIKQLMGTVEELQKRNHKDSQFETDIVQRMEQETQRKLEQLRAELDEMYGQQIVQMKQELIRQHMAQMEEMKTRHKGEMENALRSYSNITVNEDQIKLMNVAINELNIKLQDTNSQKEKLKEELGLILEEKCALQRQLEDLVEELSFSREQIQRARQTIAEQESKLNEAHKSLSTVEDLKAEIVSASESRKELELKHEAEVTNYKIKLEMLEKEKNAVLDRMAESQEAELERLRTQLLFSHEEELSKLKEDLEIEHRINIEKLKDNLGIHYKQQIDGLQNEMSQKIETMQFEKDNLITKQNQLILEISKLKDLQQSLVNSKSEEMTLQINELQKEIEILRQEEKEKGTLEQEVQELQLKTELLEKQMKEKENDLQEKFAQLEAENSILKDEKKTLEDMLKIHTPVSQEERLIFLDSIKSKSKDSVWEKEIEILIEENEDLKQQCIQLNEEIEKQRNTFSFAEKNFEVNYQELQEEYACLLKVKDDLEDSKNKQELEYKSKLKALNEELHLQRINPTTVKMKSSVFDEDKTFVAETLEMGEVVEKDTTELMEKLEVTKREKLELSQRLSDLSEQLKQKHGEISFLNEEVKSLKQEKEQVSLRCRELEIIINHNRAENVQSCDTQVSSLLDGVVTMTSRGAEGSVSKVNKSFGEESKIMVEDKVSFENMTVGEESKQEQLILDHLPSVTKESSLRATQPSENDKLQKELNVLKSEQNDLRLQMEAQRICLSLVYSTHVDQVREYMENEKDKALCSLKEELIFAQEEKIKELQKIHQLELQTMKTQETGDEGKPLHLLIGKLQKAVSEECSYFLQTLCSVLGEYYTPALKCEVNAEDKENSGDYISENEDPELQDYRYEVQDFQENMHTLLNKVTEEYNKLLVLQTRLSKIWGQQTDGMKLEFGEENLPKEETEFLSIHSQMTNLEDIDVNHKSKLSSLQDLEKTKLEEQVQELESLISSLQQQLKETEQNYEAEIHCLQKRLQAVSESTVPPSLPVDSVVITESDAQRTMYPGSCVKKNIDGTIEFSGEFGVKEETNIVKLLEKQYQEQLEEEVAKVIVSMSIAFAQQTELSRISGGKENTASSKQAHAVCQQEQHYFNEMKLSQDQIGFQTFETVDVKFKEEFKPLSKELGEHGKEILLSNSDPHDIPESKDCVLTISEEMFSKDKTFIVRQSIHDEISVSSMDASRQLMLNEEQLEDMRQELVRQYQEHQQATELLRQAHMRQMERQREDQEQLQEEIKRLNRQLAQRSSIDNENLVSERERVLLEELEALKQLSLAGREKLCCELRNSSTQTQNGNENQGEVEEQTFKEKELDRKPEDVPPEILSNERYALQKANNRLLKILLEVVKTTAAVEETIGRHVLGILDRSSKSQSSASLIWRSEAEASVKSCVHEEHTRVTDESIPSYSGSDMPRNDINMWSKVTEEGTELSQRLVRSGFAGTEIDPENEELMLNISSRLQAAVEKLLEAISETSSQLEHAKVTQTELMRESFRQKQEATESLKCQEELRERLHEESRAREQLAVELSKAEGVIDGYADEKTLFERQIQEKTDIIDRLEQELLCASNRLQELEAEQQQIQEERELLSRQKEAMKAEAGPVEQQLLQETEKLMKEKLEVQCQAEKVRDDLQKQVKALEIDVEEQVSRFIELEQEKNTELMDLRQQNQALEKQLEKMRKFLDEQAIDREHERDVFQQEIQKLEQQLKVVPRFQPISEHQTREVEQLANHLKEKTDKCSELLLSKEQLQRDIQERNEEIEKLEFRVRELEQALLVSADTFQKVEDRKHFGAVEAKPELSLEVQLQAERDAIDRKEKEITNLEEQLEQFREELENKNEEVQQLHMQLEIQKKESTTRLQELEQENKLFKDDMEKLGLAIKESDAMSTQDQHVLFGKFAQIIQEKEVEIDQLNEQVTKLQQQLKITTDNKVIEEKNELIRDLETQIECLMSDQECVKRNREEEIEQLNEVIEKLQQELANIGQKTSMNAHSLSEEADSLKHQLDVVIAEKLALEQQVETANEEMTFMKNVLKETNFKMNQLTQELFSLKRERESVEKIQSIPENSVNVAIDHLSKDKPELEVVLTEDALKSLENQTYFKSFEENGKGSIINLETRLLQLESTVSAKDLELTQCYKQIKDMQEQGQFETEMLQKKIVNLQKIVEEKVAAALVSQIQLEAVQEYAKFCQDNQTISSEPERTNIQNLNQLREDELGSDISALTLRISELESQVVEMHTSLILEKEQVEIAEKNVLEKEKKLLELQKLLEGNEKKQREKEKKRSPQDVEVLKTTTELFHSNEESGFFNELEALRAESVATKAELASYKEKAEKLQEELLVKETNMTSLQKDLSQVRDHLAEAKEKLSILEKEDETEVQESKKACMFEPLPIKLSKSIASQTDGTLKISSSNQTPQILVKNAGIQINLQSECSSEEVTEIISQFTEKIEKMQELHAAEILDMESRHISETETLKREHYVAVQLLKEECGTLKAVIQCLRSKEGSSIPELAHSDAYQTREICSSDSGSDWGQGIYLTHSQGFDIASEGRGEESESATDSFPKKIKGLLRAVHNEGMQVLSLTESPYSDGEDHSIQQVSEPWLEERKAYINTISSLKDLITKMQLQREAEVYDSSQSHESFSDWRGELLLALQQVFLEERSVLLAAFRTELTALGTTDAVGLLNCLEQRIQEQGVEYQAAMECLQKADRRSLLSEIQALHAQMNGRKITLKREQESEKPSQELLEYNIQQKQSQMLEMQVELSSMKDRATELQEQLSSEKMVVAELKSELAQTKLELETTLKAQHKHLKELEAFRLEVKDKTDEVHLLNDTLASEQKKSRELQWALEKEKAKLGRSEERDKEELEDLKFSLESQKQRNLQLNLLLEQQKQLLNESQQKIESQRMLYDAQLSEEQGRNLELQVLLESEKVRIREMSSTLDRERELHAQLQSSDGTGQSRPPLPSEDLLKELQKQLEEKHSRIVELLNETEKYKLDSLQTRQQMEKDRQVHRKTLQTEQEANTEGQKKMHELQSKVEDLQRQLEEKRQQVYKLDLEGQRLQGIMQEFQKQELEREEKRESRRILYQNLNEPTTWSLTSDRTRNWVLQQKIEGETKESNYAKLIEMNGGGTGCNHELEMIRQKLQCVASKLQVLPQKASERLQFETADDEDFIWVQENIDEIILQLQKLTGQQGEEPSLVSPSTSCGSLTERLLRQNAELTGHISQLTEEKNDLRNMVMKLEEQIRWYRQTGAGRDNSSRFSLNGGANIEAIIASEKEVWNREKLTLQKSLKRAEAEVYKLKAELRNDSLLQTLSPDSEHVTLKRIYGKYLRAESFRKALIYQKKYLLLLLGGFQECEDATLALLARMGGQPAFTDLEVITNRPKGFTRFRSAVRVSIAISRMKFLVRRWHRVTGSVSININRDGFGLNQGAEKTDSFYHSSGGLELYGEPRHTTYRSRSDLDYIRSPLPFQNRYPGTPADFNPGSLACSQLQNYDPDRALTDYITRLEALQRRLGTIQSGSTTQFHAGMRRXSFETSLIEVILNRFPFVNQWFFCAFVL

SEQ ID NO: 772 - protein, 525 aa, Homo Sapiens
  misc_feature (519)..(519): Xaa can be any naturally occurring amino acid
MTSSKIEMPGEVKADPAALMASLHLLPSPTPNLEIKYTKIFINNEWQNSESGRVFPVYNPATGEQVCEVQEADKADIDKAVQAARLAFSLGSVWRRMDASERGRLLDKLADLVERDRAVLATMESLNGGKPFLQAFYVDLQGVIKTFRYYAGWADKIHGMTIPVDGDYFTFTRHEPIGVCGQIIPWNFPLLMFAWKIAPALCCGNTVVIKPAEQTPLSALYMGALIKEAGFPPGVINILPGYGPTAGAAIASHIGIDKIAFTGSTEVGKLIQEAAGRSNLKRVTLELGGKSPNIIFADADLDYAVEQAHQGVFFNQGQCCTAGSRIFVEESIYEEFVRRSVERAKRRVVGSPFDPTTEQGPQIDKKQYNKILELIQSGVAEGAKLECGGKGLGRKGFFIEPTVFSNVTDDMRIAKEEIFGPVQEILRFKTMDEVIERANNSDFGLVAAVFTNDINKALTVSSAMQAGTVWINCYNALNAQSPFGGFKMSGNGREMGEFGLREYSEVKTVTVKIPQKNSXEGQEGG

SEQ ID NO: 773 - protein, 487 aa, Homo Sapiens
  misc_feature (481)..(481): Xaa can be any naturally occurring amino acid
MTSSKIEMPGEVKADPAALMASLHLLPSPTPNLEIKYTKIFINNEWQNSESGRVFPVYNPATGEQVCEVQEADKADIDKAVQAARLAFSLGSVWRRMDASERGRLLDKLADLVERDRAVLATMESLNGGKPFLQAFYVDLQGVIKTFRYYAGWADKIHGMTIPVDGDYFTFTRHEPIGVCGQIIPWNFPLLMFAWKIAPALCCGNTVVIKPAEQTPLSALYMGALIKEVGKLIQEAAGRSNLKRVTLELGGKSPNIIFADADLDYAVEQAHQGVFFNQGQCCTAGSRIFVEESIYEEFVRRSVERAKRRVVGSPFDPTTEQGPQIDKKQYNKILELIQSGVAEGAKLECGGKGLGRKGFFIEPTVFSNVTDDMRIAKEEIFGPVQEILRFKTMDEVIERANNSDFGLVAAVFTNDINKALTVSSAMQAGTVWINCYNALNAQSPFGGFKMSGNGREMGEFGLREYSEVKTVTVKIPQKNSXEGQEGG

SEQ ID NO: 774 - protein, 546 aa, Homo Sapiens
  misc_feature (536)..(536): Xaa can be any naturally occurring amino acid
MAALLAAAAVRARILQVSSKVKSSPTWYSASSFSSSVPTVKLFIGGKFVESKSDKWIDIHNPATNEVIGRVPQATKAEMDAAIASCKRAFPAWADTSVLSRQQVLLRYQQLIKENLKEIAKLITLEQGKTLADAEGDVFRGLQVVEHACSVTSLMMGETMPSITKDMDLYSYRLPLGVCAGIAPFNFPAMIPLWMFPMAMVCGNTFLMKPSERVPGATMLLAKLLQDSGAPDGTLNIIHGQHEAVNFICDHPDIKAISFVGSNKAGEYIFERGSRHGKRVQANMGAKNHGVVMPDANKENTLNQLVGAAFGAAGQRCMALSTAVLVGEAKKWLPELVEHAKNLRVNAGDQPGADLGPLITPQAKERVCNLIDSGTKEGASILLDGRKIKVKGYENGNFVGPTIISNVKPNMTCYKEEIFGPVLVVLETETLDEAIQIVNNNPYGNGTAIFTTNGATARKYAHLVDVGQVGVNVPIPVPLPMFSFTGSRSSFRGDTNFYGKQGIQFYTQLKTITSQWKEEDATLSSPAVVMPTMGRXKQVCLRLTPS

SEQ ID NO: 775 - protein, 386 aa, Homo Sapiens
  misc_feature (353)..(353): Xaa can be any naturally occurring amino acid
MRSLGALLLLLSACLAVSAGPVPTPPDNIQVQENFNISRIYGKWYNLAIGSTCPWLKKIMDRMTVSTLVLGEGATEAEISMTSTRWRKGVCEETSGAYEKTDTDGKFLYHKSKWNITMESYVVHTNYDEYAIFLTKKFSRHHGPTITAKLYGRAPQLRETLLQDFRVVAQGVGIPEDSIFTMADRGECVPGEQEPEPILIPRVRRAVLPQEEEGSGGGQLVTEVTKKEDSCQLGYSAGPCMGMTSRYFYNGTSMACETFQYGGCMGNGNNFVTEKECLQTCRTVAACNLPIVRGPCRAFIQLWAFDAVKGKCVLFPYGGCQGNGNKFYSEKECREYCGVPGDGDEELLRFSNXQLAGLQVRGWPVSVPGSCGRQRQATWVQIKTKL

SEQ ID NO: 776 - protein, 3975 aa, Homo Sapiens
  misc_feature (3958)..(3958): Xaa can be any naturally occurring amino acid
MMNEDAAQKSDSGEKFNGSSQRRKRPKKSDSNASFLRAARAGNLDKVVEYLKGGIDINTCNQNGLNALHLAAKEGHVGLVQELLGRGSSVDSATKKGNTALHIASLAGQAEVVKVLVKEGANINAQSQNGFTPLYMAAQENHIDVVKYLLENGANQSTATEDGFTPLAVALQQGHNQAVAILLENDTKGKVRLPALHIAARKDDTKSAALLLQNDHNADVQSKMMVNRTTESGFTPLHIAAHYGNVNVATLLLNRGAAVDFTARNGITPLHVASKRGNTNMVKLLLDRGGQIDAKTRDGLTPLHCAARSGHDQVVELLLERGAPLLARTKNGLSPLHMAAQGDHVECVKHLLQHKAPVDDVTLDYLTALHVAAHCGHYRVTKLLLDKRANPNARALNGFTPLHIACKKNRIKVMELLVKYGASIQAITESGLTPIHVAAFMGHLNIVLLLLQNGASPDVTNIRGETALHMAARAGQVEVVRCLLRNGALVDARAREEQTPLHIASRLGKTEIVQLLLQHMAHPDAATTNGYTPLHISAREGQVDVASVLLEAGAAHSLATKKGFTPLHVAAKYGSLDVAKLLLQRRAAADSAGKNGLTPLHVAAHYDNQKVALLLLEKGASPHATAKNGYTPLHIAAKKNQMQIASTLLNYGAETNIVTKQGVTPLHLASQEGHTDMVTLLLDKGANIHMSTKSGLTSLHLAAQEDKVNVADILTKHGADQDAHTKLGYTPLIVACHYGNVKMVNFLLKQGANVNAKTKNGYTPLHQAAQQGHTHIINVLLQHGAKPNATTANGNTALAIAKRLGYISVVDTLKVVTEEVTTTTTTITEKHKLNVPETMTEVLDVSDEEGDDTMTGDGGEYLRPEDLKELGDDSLPSSQFLDGMNYLRYSLEGGRSDSLRSFSSDRSHTLSHASYLRDSAVMDDSVVIPSHQVSTLAKEAERNSYRLSWGTENLDNVALSSSPIHSGFLVSFMVDARGGAMRGCRHNGLRIIIPPRKCTAPTRVTCRLVKRHRLATMPPMVEGEGLASRLIEVGPSGAQFLGKLHLPTAPPPLNEGESLVSRILQLGPPGTKFLGPVIVEIPHFAALRGKERELVVLRSENGDSWKEHFCDYTEDELNEILNGMDEVLDSPEDLEKKRICRIITRDFPQYFAVVSRIKQDSNLIGPEGGVLSSTVVPQVQAVFPEGALTKRIRVGLQAQPMHSELVKKILGNKATFSPIVTLEPRRRKFHKPITMTIPVPKASSDVMLNGFGGDAPTLRLLCSITGGTTPAQWEDITGTTPLTFVNECVSFTTNVSARFWLIDCRQIQESVTFASQVYREIICVPYMAKFVVFAKSHDPIEARLRCFCMTDDKVDKTLEQQENFAEVARSRDVEVLEGKPIYVDCFGNLVPLTKSGQHHIFSFFAFKENRLPLFVKVRDTTQEPCGRLSFMKEPKSTRGLVHQAICNLNITLPIYTKESESDQEQEEEIDMTSEKNDETESTETSVLKSHLVNEVPVLASPDLLSEVSEMKQDLIKMTAILTTDVSDKAGSIKVKELVKAAEEEPGEPFEIVERVKEDLEKVNEILRSGTCTRDESSVQSSRSERGLVEEEWVIVSDEEIEEARQKAPLEITEYPCVEVRIDKEIKGKVEKDSTGLVNYLTDDLNTCVPLPKEQLQTVQDKAGKKCEALAVGRSSEKEGKDIPPDETQSTQKQHKPSLGIKKPVRRKLKEKQKQKEEGLQASAEKAELKKGSSEESLGEDPGLAPEPLPTVKATSPLIEETPIGSIKDKVKALQKRVEDEQKGRSKLPIRVKGKEDVPKKTTHRPHPAASPSLKSERHAPGSPSPKTERHSTLSSSAKTERHPPVSPSSKTEKHSPVSPSAKTERHSPASSSSKTEKHSPVSPSTKTERHSPVSSTKTERHPPVSPSGKTDKRPPVSPSGRTEKHPPVSPGRTEKRLPVSPSGRTDKHQPVSTAGKTEKHLPVSPSGKTEKQPPVSPTSKTERIEETMSVRELMKAFQSGQDPSKHKTGLFEHKSAKQKQPQEKGKVRVEKEKGPILTQREAQKTENQTIKRGQRLPVTGTAESKRGVRVSSIGVKKEDAAGGKEKVLSHKIPEPVQSVPEEESHRESEVPKEKMADEQGDMDLQISPDRKTSTDFSEVIKQELEDNDKYQQFRLSEETEKAQLHLDQVLTSPFNTTFPLDYMKDEFLPALSLQSGALDGSSESLKNEGVAGSPCGSLMEGTPQISSEESYKHEGLAETPETSPESLSFSPKKSEEQTGETKESTKTETTTEIRSEKEHPTTKDITGGSEERGATVTEDSETSTESFQKEATLGSPKDTSPKRQDDCTGSCSVALAKETPTGLTEEAACDEGQRTFGSSAHKTQTDSEVQESTATSDETKALPLPEASVKTDTGTESKPQGVIRSPQGLELALPSRDSEVLSAVADDSLAVSHKDSLEASPVLEDNSSHKTPDSLEPSPLKESPCRDSLESSPVEPKMKAGIFPSHFPLPAAVAKTELLTEVASVRSRLLRDPDGSAEDDSLEQTSLMESSGKSPLSPDTPSSEEVSYEVTPKTTDVSTPKPAVIHECAEEDDSENGEKKRFTPEEEMFKMVTKIKMFDELEQEAKQKRDYKKEPKQEESSSSSDPDADCSVDVDEPKHTGSGEDESGVPVLVTSESRKVSSSSESEPELAQLKKGADSGLLPEPVIRVQPPSPLPSSMDSNSSPEEVQFQPVVSKQYTFKMNEDTQEEPGKSEEEKDSESHLAEDRHAVSTEAEDRSYDKLNRDTDQPKICDGHGCEAMSPSSSAAPVSSGLQSPTGDDVDEQPVIYKESLALQGTHEKDTEGEELDVSRAESPQADCPSESFSSSSSLPHCLVSEGKELDEDISATSSIQKTEVTKTDETFENLPKDCPSQDSSITTQTDRFSMDVPVSDLAENDEIYDPQITSPYENVPSQSFFSSEESKTQTDANHTTSFHSSEVYSVTITSPVEDVVVASSSSGTVLSKESNFEGQDIKMESQQESTLWEMQSDSVSSSFEPTMSATTTVVGEQISKVIITKTDVDSDSWSEIREDDEAFEARVKEEEQKIFGLMVDRQSQGTTPDTTPARTPTEEGTPTSEQNPFLFQEGKLFEMTRSGAIDMTKRSYADESFHFFQIGQESREETLSEDVKEGATGADPLPLETSAESLALSESKETVDDEADLLPDDVSEEVEEIPASDAQLNSQMGISASTETPTKEAVSVGTKDLPTVQTGDIPPLSGVKQISCPDSSEPAVQVQLDFSTLTRSVYSDRGDDSPDSSPEEQKSVIEIPTAPMENVPFTESKSKIPVRTMPTSTPAPPSAEYESSVSEDFLSSVDEENKADEAKPKSKLPVKVPLQRVEQQLSDLDTSVQKTVAPQGQDMASIAPDNRSKSESDASSLDSKTKCPVKTRSYTETETESRERAEELELESEEGATRPKILTSRLPVKSRSTTSSCRGGTSPTKESKEHFFDLYRNSIEFFEEISDEASKLVDRLTQSEREQEIVSDDESSSALEVSVIENLPPVETEHSVPEDIFDTRPIWDESIETLIERIPDENGHDHAEDPQDEQERIEERLAYIADHLGFSWTELARELDFTEEQIHQIRIENPNSLQDQSHALLKYWLERDGKHATDTNLVECLTKINRMDIVHLMETNTEPLQERISHSYAEIEQTITLDHSEGFSVLQEELCTAQHKQKEEQAVSKESETCDHPPIVSEEDISVGYSTFQDGVPKTEGDSSATALFPQTHKEQVQQDFSGKMQDLPEESSLEYQQEYFVTTPGTETSETQKAMIVPSSPSKTPEEVSTPAEEEKLYLQTPTSSERGGSPIIQEPEEPSEHREESSPRKTSLVIVESADNQPETCERLDEDAAFEKGDDMPEIPPETVTEEEYIDEHGHTVVKKVTRKIIRRYVSSEGTEKEEIMVQGMPQEPVNIEEGDGYSKVIKRVVLKSDTEQSEDNNEXSHHTEEGCGEGPAWKTH

SEQ ID NO: 777 - protein, 1021 aa, Homo Sapiens
  misc_feature (968)..(968): Xaa can be any naturally occurring amino acid
MAKGFYISKSLGILGILLGVAAVCTIIALSVVYSQEKNKNANSSPVASTTPSASATTNPASATTLDQSKAWNRYRLPNTLKPDSYRVTLRPYLTPNDRGLYVFKGSSTVRFTCKEATDVIIIHSKKLNYTLSQGHRVVLRGVGGSQPPDIDKTELVEPTEYLVVHLKGSLVKDSQYEMDSEFEGELADDLAGFYRSEYMEGNVRKVVATTQMQAADARKSFPCFDEPAMKAEFNITLIHPKDLTALSNMLPKGPSTPLPEDPNWNVTEFHTTPKMSTYLLAFIVSEFDYVEKQASNGVLIRIWARPSAIAAGHGDYALNVTGPILNFFAGHYDTPYPLPKSDQIGLPDFNAGAMENWGLVTYRENSLLFDPLSSSSSNKERVVTVIAHELAHQWFGNLVTIEWWNDLWLNEGFASYVEYLGADYAEPTWNLKDLMVLNDVYRVMAVDALASSHPLSTPASEINTPAQISELFDAISYSKGASVLRMLSSFLSEDVFKQGLASYLHTFAYQNTIYLNLWDHLQEAVNNRSIQLPTTVRDIMNRWTLQMGFPVITVDTSTGTLSQEHFLLDPDSNVTRPSEFNYVWIVPITSIRDGRQQQDYWLIDVRAQNDLFSTSGNEWVLLNLNVTGYYRVNYDEENWRKIQTQLQRDHSAIPVINRAQIINDAFNLASAHKVPVTLALNNTLFLIEERQYMPWEAALSSLSYFKLMFDRSEVYGPMKNYLKKQVTPLFIHFRNNTNNWREIPENLMDQYSEVNAISTACSNGVPECEEMVSGLFKQWMENPNNNPIHPNLRSTVYCNAIAQGGEEEWDFAWEQFRNATLVNEADKLRAALACSKELWILNRYLSYTLNPDLIRKQDATSTIISITNNVIGQGLVWDFVQSNWKKLFNDYGGGSFSFSNLIQAVTRRFSTEYELQQLEQFKKDNEETGFGSGTRALEQALEKTKANIKWVKENKEVVLQWFTENSKXSPALEVTRPPCKVPTCVHPSGWCRASIPGARGTSVLPSRTKSPAHVLSACEPV

SEQ ID NO: 778 - protein, 363 aa, Homo Sapiens
  misc_feature (358)..(358): Xaa can be any naturally occurring amino acid
MGNRHSQSYTLSEGSQQLPKGDSQPSTVVQPLSHPSRNGEPEAPQPAKASSPQGFDVDRDAKKLNKACKGMGTNEAAIIEILSGRTSDERQQIKQKYKATYGKELEEVLKSELSGNFEKTALALLDRPSEYAARQLQKAMKGLGTDESVLIEVLCTRTNKEIIAIKEAYQRLFDRSLESDVKGDTSGNLKKILVSLLQANRNEGDDVDKDLAGQDAKDLYDAGEGRWGTDELAFNEVLAKRSYKQLRATFQAYQILIGKDIEEAIEEETSGDLQKAYLTLVRCAQDCEDYFAERLYKSMKGAGTDEETLIRIVVTRAEVDLQGIKAKFQEKYQKSLSDMVRSDTSGDFRKLLVALLHXAKPGQ

SEQ ID NO: 779 - protein, 358 aa, Homo Sapiens
  misc_feature (321)..(321): Xaa can be any naturally occurring amino acid
MAQVLRGTVTDFPGFDERADAETLRKAMKGLGTDEESILTLLTSRSNAQRQEISAAFKTLFGRDLLDDLKSELTGKFEKLIVALMKPSRLYDAYELKHALKGAGTNEKVLTEIIASRTPEELRAIKQVYEEEYGSSLEDDVVGDTSGYYQRMLVVLLQANRDPDAGIDEAQVEQDAQALFQAGELKWGTDEEKFITIFGTRSVSHLRKVFDKYMTISGFQIEETIDRETSGNLEQLLLAVVKSIRSIPAYLAETLYYAMKGAGTDDHTLIRVMVSRSEIDLFNIRKEFRKNFATSLYSMIKGDTSGDYKKALLLLCGEDDXRVTGKSSLLCACTTPLPSFSTFSCICMPVLNTLPYSY

SEQ ID NO: 780 - protein, 859 aa, Homo Sapiens
  misc_feature (823)..(823): Xaa can be any naturally occurring amino acid
MPAPIRLRELIRTIRTARTQAEEREMIQKECAAIRSSFREEDNTYRCRNVAKLLYMHMLGYPAHFGQLECLKLIASQKFTDKRIGYLGAMLLLDERQDVHLLMTNCIKNDLNHSTQFVQGLALCTLGCMGSSEMCRDLAGEVEKLLKTSNSYLRKKAALCAVHVIRKVPELMEMFLPATKNLLNEKNHGVLHTSVVLLTEMCERSPDMLAHFRKLVPQLVRILKNLIMSGYSPEHDVSGISDPFLQVRILRLLRILGRNDDDSSEAMNDILAQVATNTETSKNVGNAILYETVLTIMDIKSESGLRVLAINILGRFLLNNDKNIRYVALTSLLKTVQTDHNAVQRHRSTIVDCLKDLDVSIKRRAMELSFALVNGNNIRGMMKELLYFLDSCEPEFKADCASGIFLAAEKYAPSKRWHIDTIMRVLTTAGSYVRDDAVPNLIQLITNSVEMHAYTVQRLYKAILGDYSQQPLVQVAAWCIGEYGDLLVSGQCEEEEPIQVTEDEVLDILESVLISNMSTSVTRGYALTAIMKLSTRFTCTVNRIKKVVSIYGSSIDVELQQRAVEYNALFKKYDHMRSALLERMPVMEKVTTNGPTEIVQTNGETEPAPLETKPPPSGPQPTSQANDLLDLLGGNDITPVIPTAPTSKPSSAGGELLDLLGDINLTGAPAAAPAPASVPQISQPPFLLDGLSSQPLFNDIAAGIPSITAYSKNGLKIEFTFERSNTNPSVTVITIQASNSTELDMTDFVFQAAVPKTFQLQLLSPSSSIVPAFNTGTITQVIKVLNPQKQQLRMRIKLTYNHKGSAMQDLAEVNNFPPQSWQXGFGTILILYPTQSKELWEGGCDCWQVPPNCTTGMRS

SEQ ID NO: 781 - protein, 2870 aa, Homo Sapiens
  misc_feature (2844)..(2844): Xaa can be any naturally occurring amino acid
MAAASYDQLLKQVEALKMENSNLRQELEDNSNHLTKLETEASNMKEVLKQLQGSIEDEAMASSGQIDLLERLKELNLDSSNFPGVKLRSKMSLRSYGSREGSVSSRSGECSPVPMGSFPRRGFVNGSRESTGYLEELEKERSLLLADLDKEEKEKDWYYAQLQNLTKRIDSLPLTENFSLQTDMTRRQLEYEARQIRVAMEEQLGTCQDMEKRAQRRIARIQQIEKDILRIRQLLQSQATEAERSSQNKHETGSHDAERQNEGQGVGEINMATSGNGQGSTTRMDHETASVLSSSSTHSAPRRLTSHLGTKVEMVYSLLSMLGTHDKDDMSRTLLAMSSSQDSCISMRQSGCLPLLIQLLHGNDKDSVLLGNSRGSKEARARASAALHNIIHSQPDDKRGRREIRVLHLLEQIRAYCETCWEWQEAHEPGMDQDKNPMPAPVEHQICPAVCVLMKLSFDEEHRHAMNELGGLQAIAELLQVDCEMYGLTNDHYSITLRRYAGMALTNLTFGDVANKATLCSMKGCMRALVAQLKSESEDLQQVIASVLRNLSWRADVNSKKTLREVGSVKALMECALEVKKESTLKSVLSALWNLSAHCTENKADICAVDGALAFLVGTLTYRSQTNTLAIIESGGGILRNVSSLIATNEDHRQILRENNCLQTLLQHLKSHSLTIVSNACGTLWNLSARNPKDQEALWDMGAVSMLKNLIHSKHKMIAMGSAAALRNLMANRPAKYKDANIMSPGSSLPSLHVRKQKALEAELDAQHLSETFDNIDNLSPKASHRSKQRHKQSLYGDYVFDTNRHDDNRSDNFNTGNMTVLSPYLNTTVLPSSSSSRGSLDSSRSEKDRSLERERGIGLGNYHPATENPGTSSKRGLQISTTAAQIAKVMEEVSAIHTSQEDRSSGSTTELHCVTDERNALRRSSAAHTHSNTYNFTKSENSNRTCSMPYAKLEYKRSSNDSLNSVSSSDGYGKRGQMKPSIESYSEDDESKFCSYGQYPADLAHKIHSANHMDDNDGELDTPINYSLKYSDEQLNSGRQSPSQNERWARPKHIIEDEIKQSEQRQSRNQSTTYPVYTESTDDKHLKFQPHFGQQECVSPYRSRGANGSETNRVGSNHGINQNVSQSLCQEDDYEDDKPTNYSERYSEEEQHEEEERPTNYSIKYNEEKRHVDQPIDYSLKYATDIPSSQKQSFSFSKSSSGQSSKTEHMSSSSENTSTPSSNAKRQNQLHPSSAQSRSGQPQKAATCKVSSINQETIQTYCVEDTPICFSRCSSLSSLSSAEDEIGCNQTTQEADSANTLQIAEIKEKIGTRSAEDPVSEVPAVSQHPRTKSSRLQGSSLSSESARHKAVEFSSGAKSPSKSGAQTPKSPPEHYVQETPLMFSRCTSVSSLDSFESRSIASSVQSEPCSGMVSGIISPSDLPDSPGQTMPPSRSKTPPPPPQTAQTKREVPKNKAPTAEKRESGPKQAAVNAAVQRVQVLPDADTLLHFATESTPDGFSCSSSLSALSLDEPFIQKDVELRIMPPVQENDNGNETESEQPKESNENQEKEAEKTIDSEKDLLDDSDDDDIEILEECIISAMPTKSSRKAKKPAQTASKLPPPVARKPSQLPVYKLLPSQNRLQPQKHVSFTPGDDMPRVYCVEGTPINFSTATSLSDLTIESPPNELAAGEGVRGGAQSGEFEKRDTIPTEGRSTDEAQGGKTSSVTIPELDDNKAEEGDILAECINSAMPKGKSHKPFRVKKIMDQVQQASASSSAPNKNQLDGKKKKPTSPVKPIPQNTEYRTRVRKNADSKNNLNAERVFSDNKDSKKQNLKNNSKVFNDKLPNNEDRVRGSFAFDSPHHYTPIEGTPYCFSRNDSLSSLDFDDDDVDLSREKAELRKAKENKESEAKVTSHTELTSNQQSANKTQAIAKQPINRGQPKPILQKQSTFPQSSKDIPDRGAATDEKLQNFAIENTPVCFSHNSSLSSLSDIDQENNNKENEPIKETEPPDSQGEPSKPQASGYAPKSFHVEDTPVCFSRNSSLSSLSIDSEDDLLQECISSAMPKKKKPSRLKGDNEKHSPRNMGGILGEDLTLDLKDIQRPDSEHGLSPDSENFDWKAIQEGANSIVSSLHQAAAAACLSRQASSDSDSILSLKSGISLGSPFHLTPDQEEKPFTSNKGPRILKPGEKSTLETKKIESESKGIKGGKKVYKSLITGKVRSNSEISGQMKQPLQANMPSISRGRTMIHIPGVRNSSSSTSPVSKKGPPLKTPASKSPSEGQTATTSPRGAKPSVKSELSPVARQTSQIGGSSKAPSRSGSRDSTPSRPAQQPLSRPIQSPGRNSISPGRNGISPPNKLSQLPRTSSPSTASTKSSGSGKMSYTSPGRQMSQQNLTKQTGLSKNASSIPRSESASKGLNQMNNGNGANKKVELSRMSSTKSSGSESDRSERPVLVRQSTFIKEAPSPTLRRKLEESASFESLSPSSRPASPTRSQAQTPVLSPSLPDMSLSTHSSVQAGGWRKLPPNLSPTIEYNDGRPAKRHDIARSHSESPSRLPINRSGTWKREHSKHSSSLPRVSTWRRTGSSSSILSASSESSEKAKSEDEKHVNSISGTKQSKENQVSAKGTWRKIKENEFSPTNSTSQTVSSGATNGAESKTLIYQMAPAVSKTEDVWVRIEDCPINNPRSGRSPTGNTPPVIDSVSEKANPNIKDSKDNQAKQNVGNGSVPMRTVGLENRLNSFIQVDAPDQKGTEIKPGQNNPVPVSETNESSIVERTPFSSSSSSKHSSPSGTVAARVTPFNYNPSPRKSSADSTSARPSQIPTPVNNNTKKRDSKTDSTESSGTQSPKRHSGSYLVTSVXKRGRMKLRKFYVNYNCYIDILFQMKL

SEQ ID NO: 782 - protein, 238 aa, Homo Sapiens
  misc_feature (224)..(224): Xaa can be any naturally occurring amino acid
MNKPLLWISVLTSLLEAFAHTDLSGKVFVFPRESVTDHVNLITPLEKPLQNFTLCFRAYSDLSRAYSLFSYNTQGRDNELLVYKERVGEYSLYIGRHKVTSKVIEKFPAPVHICVSWESSSGIAEFWINGTPLVKKGLRQGYFVEAQPKIVLGQEQDSYGGKFDRSQSFVGEIGDLYMWDSVLPPENILSAYQGTPLPANILDWQALNYEIRGYVIIKPLVWVXGLDSTRALENEMTV

SEQ ID NO: 783 - protein, 124 aa, Homo Sapiens
  misc_feature (102)..(102): Xaa can be any naturally occurring amino acid
MGTRLLPALFLVLLVLGFEVQGTQQPQQDEMPSPTFLTQVKESLSSYWESAKTAAQNLYEKTYLPAVDEKLRDLYSKSTAAMSTYTGIFTDQVLSVLKGEEXQPDPPSVDKGRVPYSPDPPGSD

SEQ ID NO: 784 - protein, 152 aa, Homo Sapiens
  misc_feature (128)..(128): Xaa can be any naturally occurring amino acid
MSLLRNRLQALPALCLCVLVLACIGACQPEAQEGTLSPPPKLKMSRWSLVRGRMKELLETVVNRTRDGWQWFWSPSTFRGFMQTYYDDHLRDLGPLTKAWFLESKDSLLKKTHSLCPRLVCGDKDQGXNVHKSQVWLWRVPVVPATQEAEVG

SEQ ID NO: 785 - protein, 340 aa, Homo Sapiens
  misc_feature (327)..(327): Xaa can be any naturally occurring amino acid
MTGLCGYSAPDMRGLRLIMIPVELLLCYLLLHPVDATSYGKQTNVLMHFPLSLESQTPSSDPLSCQFLHPKSLPGFSHMAPLPKFLVSLALRNALEEAGCQADVWALQLQLYRQGGVNATQVLIQHLRGLQKGRSTERNVSVEALASALQLLAREQQSTGRVGRSLPTEDCENEKEQAVHNVVQLLPGVGTFYNLGTALYYATQNCLGKARERGRDGAIDLGYDLLMTMAGMSGGPMGLAISAALKPALRSGVQQLIQYYQDQKDANISQPETTKEGLRAISDVSDLEETTTLASFISEVVSSAPYWGWAIIKSYDLDPGAGSLEIXKNVVTTELITVLP

SEQ ID NO: 786 - protein, 369 aa, Homo Sapiens
  misc_feature (346)..(346): Xaa can be any naturally occurring amino acid
MISPVLILFSSFLCHVAIAGRTCPKPDDLPFSTVVPLKTFYEPGEEITYSCKPGYVSRGGMRKFICPLTGLWPINTLKCTPRVCPFAGILENGAVRYTTFEYPNTISFSCNTGFYLNGADSAKCTEEGKWSPELPVCAPIICPPPSIPTFATLRVYKPSAGNNSLYRDTAVFECLPQHAMFGNDTITCTTHGNWTKLPECREVKCPFPSRPDNGFVNYPAKPTLYYKDKATFGCHDGYSLDGPEEIECTKLGNWSAMPSCKASCKVPVKKATVVYQGERVKIQEKFKNGMLHGDKVSFFCKNKEKKCSYTEDAQCIDGTIEVPKCFKEHSSLAFWKTDASDVKPCXGGFQIPHKMSHLFLVHPRNLIEI

SEQ ID NO: 787 - protein, 440 aa, Homo Sapiens
  misc_feature (415)..(415): Xaa can be any naturally occurring amino acid
MRFKSHTVELRRPCSDMEGAALLRVSVLCIWMSALFLGVGVRAEEAGARVQQNVPSGTDTGDPQSKPLGDWAAGTMDPESSIFIEDAIKYFKEKVSTQNLLLLLTDNEAWNGFVAAAELPRNEADELRKALDNLARQMIMKDKNWHDKGQQYRNWFLKEFPRLKSELEDNIRRLRALADGVQKVHKGTTIANVVSGSLSISSGILTLVGMGLAPFTEGGSLVLLEPGMELGITAALTGITSSTMDYGKKWWTQAQAHDLVIKSLDKLKEVREFLGENISNFLSLAGNTYQLTRGIGKDIRALRRARANLQSVPHASASRPRVTEPISAESGEQVERVNEPSILEMSRGVKLTDVAPVSFFLVLDVVYLVYESKHLHEGAKSETAEELKKVAQELEEKLNILNNNYKILQADQELXPQGRAATRRDMPGRGQDKMQTFFFF

SEQ ID NO: 788 - protein, 796 aa, Homo Sapiens
  misc_feature (771)..(771): Xaa can be any naturally occurring amino acid
MLPGLALLLLAAWTARALEVPTDGNAGLLAEPQIAMFCGRLNMHMNVQNGKWDSDPSGTKTCIDTKEGILQYCQEVYPELQITNVVEANQPVTIQNWCKRGRKQCKTHPHFVIPYRCLVGEFVSDALLVPDKCKFLHQERMDVCETHLHWHTVAKETCSEKSTNLHDYGMLLPCGIDKFRGVEFVCCPLAEESDNVDSADAEEDDSDVWWGGADTDYADGSEDKVVEVAEEEEVAEVEEEEADDDEDDEDGDEVEEEAEEPYEEATERTTSIATTTTTTTESVEEVVREVCSEQAETGPCRAMISRWYFDVTEGKCAPFFYGGCGGNRNNFDTEEYCMAVCGSAMSQSLLKTTQEPLARDPVKLPTTAASTPDAVDKYLETPGDENEHAHFQKAKERLEAKHRERMSQVMREWEEAERQAKNLPKADKKAVIQHFQEKVESLEQEAANERQQLVETHMARVEAMLNDRRRLALENYITALQAVPPRPRHVFNMLKKYVRAEQKDRQHTLKHFEHVRMVDPKKAAQIRSQVMTHLRVIYERMNQSLSLLYNVPAVAEEIQDEVDELLQKEQNYSDDVLANMISEPRISYGNDALMPSLTETKTTVELLPVNGEFSLDDLQPWHSFGADSVPANTENEVEPVDARPAADRGLTTRPGSGLTNIKTEEISEVKMDAEFRHDSGYEVHHQKLVFFAEDVGSNKGAIIGLMVGGVVIATVIVITLVMLKKKQYTSIHHGVVEVDAAVTPEERHLSKMQQNGYENPTYKFFEQMQNXTPATAASEVGQQNHCFTTHRCPFIE

SEQ ID NO: 789 - protein, 777 aa, Homo Sapiens
  misc_feature (752)..(752): Xaa can be any naturally occurring amino acid
MLPGLALLLLAAWTARALEVPTDGNAGLLAEPQIAMFCGRLNMHMNVQNGKWDSDPSGTKTCIDTKEGILQYCQEVYPELQITNVVEANQPVTIQNWCKRGRKQCKTHPHFVIPYRCLVGEFVSDALLVPDKCKFLHQERMDVCETHLHWHTVAKETCSEKSTNLHDYGMLLPCGIDKFRGVEFVCCPLAEESDNVDSADAEEDDSDVWWGGADTDYADGSEDKVVEVAEEEEVAEVEEEEADDDEDDEDGDEVEEEAEEPYEEATERTTSIATTTTTTTESVEEVVREVCSEQAETGPCRAMISRWYFDVTEGKCAPFFYGGCGGNRNNFDTEEYCMAVCGSAIPTTAASTPDAVDKYLETPGDENEHAHFQKAKERLEAKHRERMSQVMREWEEAERQAKNLPKADKKAVIQHFQEKVESLEQEAANERQQLVETHMARVEAMLNDRRRLALENYITALQAVPPRPRHVFNMLKKYVRAEQKDRQHTLKHFEHVRMVDPKKAAQIRSQVMTHLRVIYERMNQSLSLLYNVPAVAEEIQDEVDELLQKEQNYSDDVLANMISEPRISYGNDALMPSLTETKTTVELLPVNGEFSLDDLQPWHSFGADSVPANTENEVEPVDARPAADRGLTTRPGSGLTNIKTEEISEVKMDAEFRHDSGYEVHHQKLVFFAEDVGSNKGAIIGLMVGGVVIATVIVITLVMLKKKQYTSIHHGVVEVDAAVTPEERHLSKMQQNGYENPTYKFFEQMQNXTPATAASEVGQQNHCFTTHRCPFIE

SEQ ID NO: 790 - protein, 721 aa, Homo Sapiens
  misc_feature (696)..(696): Xaa can be any naturally occurring amino acid
MLPGLALLLLAAWTARALEVPTDGNAGLLAEPQIAMFCGRLNMHMNVQNGKWDSDPSGTKTCIDTKEGILQYCQEVYPELQITNVVEANQPVTIQNWCKRGRKQCKTHPHFVIPYRCLVGEFVSDALLVPDKCKFLHQERMDVCETHLHWHTVAKETCSEKSTNLHDYGMLLPCGIDKFRGVEFVCCPLAEESDNVDSADAEEDDSDVWWGGADTDYADGSEDKVVEVAEEEEVAEVEEEEADDDEDDEDGDEVEEEAEEPYEEATERTTSIATTTTTTTESVEEVVRVPTTAASTPDAVDKYLETPGDENEHAHFQKAKERLEAKHRERMSQVMREWEEAERQAKNLPKADKKAVIQHFQEKVESLEQEAANERQQLVETHMARVEAMLNDRRRLALENYITALQAVPPRPRHVFNMLKKYVRAEQKDRQHTLKHFEHVRMVDPKKAAQIRSQVMTHLRVIYERMNQSLSLLYNVPAVAEEIQDEVDELLQKEQNYSDDVLANMISEPRISYGNDALMPSLTETKTTVELLPVNGEFSLDDLQPWHSFGADSVPANTENEVEPVDARPAADRGLTTRPGSGLTNIKTEEISEVKMDAEFRHDSGYEVHHQKLVFFAEDVGSNKGAIIGLMVGGVVIATVIVITLVMLKKKQYTSIHHGVVEVDAAVTPEERHLSKMQQNGYENPTYKFFEQMQNXTPATAASEVGQQNHCFTTHRCPFIE

SEQ ID NO: 791 - protein, 1015 aa, Homo Sapiens
  misc_feature (921)..(921): Xaa can be any naturally occurring amino acid
MEVQLGLGRVYPRPPSKTYRGAFQNLFQSVREVIQNPGPRHPEAASAAPPGASLLLLQQQQQQQQQQQQQQQQQQQQQQQETSPRQQQQQQGEDGSPQAHRRGPTGYLVLDEEQQPSQPQSALECHPERGCVPEPGAAVAASKGLPQQLPAPPDEDDSAAPSTLSLLGPTFPGLSSCSADLKDILSEASTMQLLQQQQQEAVSEGSSSGRAREASGAPTSSKDNYLGGTSTISDNAKELCKAVSVSMGLGVEALEHLSPGEQLRGDCMYAPLLGVPPAVRPTPCAPLAECKGSLLDDSAGKSTEDTAEYSPFKGGYTKGLEGESLGCSGSAAAGSSGTLELPSTLSLYKSGALDEAAAYQSRDYYNFPLALAGPPPPPPPPHPHARIKLENPLDYGSAWAAAAAQCRYGDLASLHGAGAAGPGSGSPSAAASSSWHTLFTAEEGQLYGPCGGGGGGGGGGGGGGGGGGGGGGGEAGAVAPYGYTRPPQGLAGQESDFTAPDVWYPGGMVSRVPYPSPTCVKSEMGPWMDSYSGPYGDMRLETARDHVLPIDYYFPPQKTCLICGDEASGCHYGALTCGSCKVFFKRAAEGKQKYLCASRNDCTIDKFRRKNCPSCRLRKCYEAGMTLGARKLKKLGNLKLQEEGEASSTTSPTEETTQKLTVSHIEGYECQPIFLNVLEAIEPGVVCAGHDNNQPDSFAALLSSLNELGERQLVHVVKWAKALPGFRNLHVDDQMAVIQYSWMGLMVFAMGWRSFTNVNSRMLYFAPDLVFNEYRMHKSRMYSQCVRMRHLSQEFGWLQITPQEFLCMKALLLFSIIPVDGLKNQKFFDELRMNYIKELDRIIACKRKNPTSCSRRFYQLTKLLDSVQPIARELHQFTFDLLIKSHMVSVDFPEMMAEIISVQVPKILSGKVKPIYFHTQXSIGNPISPPQLMPPFRCLLPVITLHYSSAVPWGISSIDVQSVMNMFLNSICWAFFFSFSPFFFFFPPYLTLPWHLQTLLPIVAPICVLNGVVCL

SEQ ID NO: 792 - protein, 533 aa, Homo Sapiens
  misc_feature (512)..(512): Xaa can be any naturally occurring amino acid
MVLLAAAVCTKAGKAIVSRQFVEMTRTRIEGLLAAFPKLMNTGKQHTFVETESVRYVYQPMEKLYMVLITTKNSNILEDLETLRLFSRVIPEYCRALEENEISEHCFDLIFAFDEIVALGYRENVNLAQIRTFTEMDSHEEKVFRAVRETQEREAKAEMRRKAKELQQARRDAERQGKKAPGFGGFGSSAVSGGSTAAMITETIIETDKPKVAPAPARPSGPSKALKLGAKGKEVDNFVDKLKSEGETIMSSSMGKRTSEATKMHAPPINMESVHMKIEEKITLTCGRDGGLQNMELHGMIMLRISDDKYGRIRLHVENEDKKGVQLQTHPNVDKKLFTAESLIGLKNPEKSFPVNSDVGVLKWRLQTTEESFIPLTINCWPSESGNGCDVNIEYELQEDNLELNDVVITIPLPSGVGAPVIGEIDGEYRHDSRRNTLEWCLPVIDAKNKSGSLEFSIAGQPNDFFPVQVSFVSKKNYCNIQVTKVTQVDGNSPVRFSTETTFLVDKYEILXYQEEGAEKENFQINKEDANDG

SEQ ID NO: 793 - protein, 1813 aa, Homo Sapiens
  misc_feature (1786)..(1786): Xaa can be any naturally occurring amino acid
MQESQTKSMFVSRALEKILADKEVKRPQHSQLRRACQVALDEIKAEIEKQRLGTAAPPKANFIEADKYFLPFELACQSKSPRVVSTSLDCLQKLIAYGHITGNAPDSGAPGKRLIDRIVETICSCFQGPQTDEGVQLQIIKALLTAVTSPHIEIHEGTILQTVRTCYNIYLASKNLINQTTAKATLTQMLNVIFTRMENQVLQEARELEKPIQSKPQSPVIQAAAVSPKFVRLKHSQAQSKPTTPEKTDLTNGEHARSDSGKVSTENGDAPRERGSSLSGTDDGAQEVVKDILEDVVTSAIKEAAEKHGLTEPERVLGELECQECAIPPGVDENSQTNGIADDRQSLSSADNLESDAQGHQVAARFSHVLQKDAFLVFRSLCKLSMKPLGEGPPDPKSHELRSKVVSLQLLLSVLQNAGPVFRTHEMFINAIKQYLCVALSKNGVSSVPDVFELSLAIFLTLLSNFKMHLKMQIEVFFKEIFLNILETSTSSFEHRWMVIQTLTRICADAQCVVDIYVNYDCDLNAANIFERLVNDLSKIAQGRSGHELGMTPLQELSLRKKGLECLVSILKCMVEWSKDLYVNPNHQTSLGQERLTDQEIGDGKGLDMARRCSVTSMESTVSSGTQTTVQDDPEQFEVIKQQKEIIEHGIELFNKKPKRGIQFLQEQGMLGTSVEDIAQFLHQEERLDSTQVGDFLGDSARFNKEVMYAYVDQLDFCEKEFVSALRTFLEGFRLPGEAQKIDRLMEKFAARYIECNQGQTLFASADTAYVLAYSIIMLTTDLHSPQVKNKMTKEQYIKMNRGINDSKDLPEEYLSSIYEEIEGKKIAMKETKELTIATKSTKQNVASEKQRRLLYNLEMEQMAKTAKALMEAVSHAKAPFTSATHLDHVRPMFKLVWTPLLAAYSIGLQNCDDTEVASLCLEGIRCAIRIACIFGMQLERDAYVQALARFSLLTASSSITEMKQKNIDTIKTLITVAHTDGNYLGNSWHEILKCISQLELAQLIGTGVKTRYLSGSGREREGSLKGHTLAGEEFMGLGLGNLVSGGVDKRQMASFQESVGETSSQSVVVAVDRIFTGSTRLDGNAIVDFVRWLCAVSMDELASPHHPRMFSLQKIVEISYYNMNRIRLQWSRIWHVIGDHFNKVGCNPNEDVAIFAVDSLRQLSMKFLEKGELANFRFQKDFLRPFEHIMKKNRSPTIRDMAIRCIAQMVNSQAANIRSGWKNIFAVFHQAASDHDGNIVELAFQTTCHIVTTIFQHHFPAAIDSFQDAVKCLSEFACNAAFPDTSMEAIRLIRFCGKYVSERPRVLQEYTSDDMNVAPGDRVWVRGWFPILFELSCIINRCKLDVRTRGLTVMFEIMKSYGHTFEKHWWQDLFRIVFRIFDNMKLPEQLSEKSEWMTTTCNHALYAICDVFTQFYEALNEVLLSDVFAQLQWCVKQDNEQLARSGTNCLENLVISNGEKFSPEVWDETCNCMLDIFKTTIPHVLLTWRPVGMEEDSSEKHLDVDLDRQSLSSIDKNPSERGQSQLSNPTDDSWKGRPYANQKLFASLLIKCVVQLELIQTIDNIVFYPATSKKEDAEHMVAAQQDTLDADIHIETEDQGMYKYMSSQHLFKLLDCLQESHSFSKAFNSNYEQRTVLWRAGFKGKSKPNLLKQETSSLACCLRILFRMYVDENRRDSWEEIQQRLLTVCSEALAYFITVNSESHREAWTSLLLLLLTKTLKINDEKFKAHASMYYPYLCEIMQFDLIPELRAVLRKFFLRIGVVYKIWIPEEPSQVPAALSPVWXPWLPRPVLQLCRMFSMPFLTGTSREVS

SEQ ID NO: 794 - protein, 451 aa, Homo Sapiens
  misc_feature (440)..(440): Xaa can be any naturally occurring amino acid
MDPLSELQDDLTLDDTSEALNQLKLASIDEKNWPSDEMPDFPKSDDSKSSSPELVTHLKWDDPYYDIARHQIVEVAGDDKYGRKIIVFSACRMPPSHQLDHSKLLGYLKHTLDQYVESDYTLLYLHHGLTSDNKPSLSWLRDAYREFDRKYKKNIKALYIVHPTMFIKTLLILFKPLISFKFGQKIFYVNYLSELSEHVKLEQLGIPRQVLKYDDFLKSTQKSPATAPKPMPPRPPLPNQQFGVSLQHLQEKNPEQEPIPIVLRETVAYLQAHALTTEGIFRRSANTQVVREVQQKYNMGLPVDFDQYNELHLPAVILKTFLRELPEPLLTFDLYPHVVGFLNIDESQRVPATLQVLQTLPEENYQVLRFLTAFLVQISAHSDQNKMTNTNLAVVFGPNLLWAKDAAITLKAINPINTFTKFLLDHQGELFPSPDPSGLXTWPLPHQPLLW

SEQ ID NO: 795 - protein, 638 aa, Homo Sapiens
  misc_feature (594)..(594): Xaa can be any naturally occurring amino acid
MKLQAVMETLLQRQQRARQELEARQQLPPDPPAAPPGRARAAPDEDREPESARMQRAQMAALAAMRAAAAGLGHPASPGGSEDGPPGSEEEDAAREGTPGSPGRGREGPGEEHFEDMASDEDMKPKWEEEEMEEDLGEDEEEEEEDYEDEEEEEDEEGLGPPGPASLGTTALFPRKAQPPQAFRGDGVPRVLGGQERPGPGPAHPGGAAHVAPQLQPPDHGDWTYEEQFKQLYELDGDPKRKEFLDDLFSFMQKRGTPVNRIPIMAKQVLDLFMLYVLVTEKGGLVEVINKKLWREITKGLNLPTSITSAAFTLRTQYMKYLYPYECEKRGLSNPNELQAAIDSNRREGRRQSFGGSLFAYSPGGAHGMLSSPKLPVSSLGLAASTNGSSITPAPKIKKEEDSAIPITVPGRLPVSLAGHPVVAAQAAAVQAAAAQAAVAAQAAALEQLREKLESAEPPEKKMALVADEQQRLMQRALQQNFLAMAAQLPMSIRINSQASESRQDSAVNLTGTNGSNSISMSVEINGIMYTGVLFAQPPAPTPTSAPNKGGGGGGGSSSNAGGRGGNTGTSGGQAGPAGLSTPSTSTSNNSLPXPHHSPPATHPGARRPGQGVQVGHTGARMAEDTGGEGRYPERSHS

SEQ ID NO: 796 - protein, 382 aa, Homo Sapiens
  misc_feature (373)..(373): Xaa can be any naturally occurring amino acid
MAYHSFLVEPISCHAWNKDRTQIAICPNNHEVHIYEKSGAKWTKVHELKEHNGQVTGIDWAPESNRIVTCGTDRNAYVWTLKGRTWKPTLVILRINRAARCVRWAPNENKFAVGSGSRVISICYFEQENDWWVCKHIKKPIRSTVLSLDWHPNNVLLAAGSCDFKCRIFSAYIKEVEERPAPTPWGSKMPFGELMFESSSSCGWVHGVCFSASGSRVAWVSHDSTVCLADADKKMAVATLASETLPLLALTFITDNSLVAAGHDCFPVLFTYDAAAGMLSFGGRLDVPKQSSQRGLTARERFQNLDKKASSEGGTAAGAGLDSLHKNSVSQISVLSGGKAKCSQFCTTGMDGGMSIWDVKSLESALKDLKIKXPVRNMLPSS

SEQ ID NO: 797 - protein, 583 aa, Homo Sapiens
  misc_feature (534)..(534): Xaa can be any naturally occurring amino acid
MGPRGAASLPRGPGPRRLLLPVVLPLLLLLLLAPPGSGAGASRPPHLVFLLADDLGWNDVGFHGSRIRTPHLDALAAGGVLLDNYYTQPLCTPSRSQLLTGRYQIRTGLQHQIIWPCQPSCVPLDEKLLPQLLKEAGYTTHMVGKWHLGMYRKECLPTRRGFDTYFGYLLGSEDYYSHERCTLIDALNVTRCALDFRDGEEVATGYKNMYSTNIFTKRAIALITNHPPEKPLFLYLALQSVHEPLQVPEEYLKPYDFIQDKNRHHYAGMVSLMDEAVGNVTAALKSSGLWNNTVFIFSTDNGGQTLAGGNNWPLRGRKWSLWEGGVRGVGFVASPLLKQKGVKNRELIHISDWLPTLVKLARGHTNGTKPLDGFDVWKTISEGSPSPRIELLHNIDPNFVDSSPCPRNSMAPAKDDSSLPEYSAFNTSVHAAIRHGNWKLLTGYPGCGYWFPPPSQYNVSEIPSSDPPTKTLWLFDIDRDPEERHDLSREYPHIVTKLLSRLQFYHKHSVPVYFPAQDPRCDPKATGVWGPWMXDFREARKPFNWKLDLRPFLTTLVSFVIPTWVHLALLLLLNHTEVSNFNP

SEQ ID NO: 798 - protein, 392 aa, Homo Sapiens
  misc_feature (328)..(328): Xaa can be any naturally occurring amino acid
MQMPAMMSLLLVSVGLMEALQAQSHPITRRDLFSQEIQLDMALASFDDQYAGCAAAMTAALPDLNHTEFQANQVYADSWTLASSQWQERQARWPEWSLSPTRPSPPPLGFRDEHGVALLAYTANSPLHKEFNAAVREAGRSRAHYLHHFSFKTLHFLLTEALQLLGSGQRPPRCHQVFRGVHGLRFRPAGPRATVRLGGFASASLKHVAAQQFGEDTFFGIWTCLGAPIKGYSFFPGEEEVLIPPFETFQVINASRLAQGPARIYLRALGKHSTYNCEYIKDKKCKSGPCHLDNSAMGQSPLSAVWSLLLLLWFLVVRAFPDGPGLLXCMRHGTASPAASAHPEDVGHVCFQCNQDSCQSHLQGTLGPSLVAARPAGGETGDNLGTEPYPGL

SEQ ID NO: 799 - protein, 514 aa, Homo Sapiens
  misc_feature (465)..(465): Xaa can be any naturally occurring amino acid
MASESGKLWGGRFVGAVDPIMEKFNASIAYDRHLWEVDVQGSKAYSRGLEKAGLLTKAEMDQILHGLDKVAEEWAQGTFKLNSNDEDIHTANERRLKELIGATAGKLHTGRSRNDQVVTDLRLWMRQTCSTLSGLLWELIRTMVDRAEAERDVLFPGYTHLQRAQPIRWSHWILSHAVALTRDSERLLEVRKRINVLPLGSGAIAGNPLGVDRELLRAELNFGAITLNSMDATSERDFVAEFLFWASLCMTHLSRMAEDLILYCTKEFSFVQLSDAYSTGSSLMPQKKNPDSLELIRSKAGRVFGRCAGLLMTLKGLPSTYNKDLQEDKEAVFEVSDTMSAVLQVATGVISTLQIHQENMGQALSPDMLATDLAYYLVRKGMPFRQAHEASGKAVFMAETKGVALNQLSLQELQTISPLFSGDVICVWDYGHSVEQYGALGGTARSSVDWQIRQVRALLQAQQAXVLPHLPPNKVGARGGCCVFPAPAWLPRCWAFGAGQWGQSGTGEAGQGGL

SEQ ID NO: 800 - protein, 1311 aa, Homo Sapiens
  misc_feature (1191)..(1191): Xaa can be any naturally occurring amino acid
MKTRQNKDSMSMRSGRKKEAPGPREELRSRGRASPGGVSTSSSDGKAEKSRQTAKKARVEEASTPKVNKQGRSEEISESESEETNAPKKTKTEQELPRPQSPSDLDSLDGRSLNDDGSSDPRDIDQDNRSTSPSIYSPGSVENDSDSSSGLSQGPARPYHPPPLFPPSPQPPDSTPRQPEASFEPHPSVTPTGYHAPMEPPTSRMFQAPPGAPPPHPQLYPGGTGGVLSGPPMGPKGGGAASSVGGPNGGKQHPPPTTPISVSSSGASGAPPTKPPTTPVGGGNLPSAPPPANFPHVTPNLPPPPALRPLNNASASPPGLGAQPLPGHLPSPHAMGQGMGGLPPGPEKGPTLAPSPHSLPPASSSAPAPPMRFPYSSSSSSSAAASSSSSSSSSSASPFPASQALPSYPHSFPPPTSLSVSNQPPKYTQPSLPSQAVWSQGPPPPPPYGRLLANSNAHPGPFPPSTGAQSTAHPPVSTHHHHHQQQQQQQQQQQQQQQQQQQHHGNSGPPPPGAFPHPLEGGSSHHAHPYAMSPSLGSLRPYPPGPAHLPPPHSQVSYSQAGPNGPPVSSSSNSSSSTSQGSYPCSHPSPSQGPQGAPYPFPPVPTVTTSSATLSTVIATVASSPAGYKTASPPGPPPYGKRAPSPGAYKTATPPGYKPGSPPSFRTGTPPGYRGTSPPAGPGTFKPGSPTVGPGPLPPAGPSGLPSLPPPPAAPASGPPLSATQIKQEPAEEYETPESPVPPARSPSPPPKVVDVPSHASQSARFNKHLDRGFNSCARSDLYFVPLEGSKLAKKRADLVEKVRREAEQRAREEKEREREREREKEREREKERELERSVKLAQEGRAPVECPSLGPVPHRPPFEPGSAVATVPPYLGPDTPALRTLSEYARPHVMSPGNRNHPFYVPLGAVDPGLLGYNVPALYSSDPAAREREREARERDLRDRLKPGFEVKPSELEPLHGVPGPGLDPFPRHGGLALQPGPPGLHPFPFHPSLGPLERERLALAAGPALRPDMSYAERLAAERQHAERVAALGNDPLARLQMLNVTPHHHQHSHIHSHLHLHQQDAIHAASASVHPLIDPLASGSHLTRIPYPAGTLPNPLLPHPLHENEVLRHQLFAAPYRDLPASLSAPMSAAHQLQAMHAQSAELQRLALEQQQWLHAHHPLHSVPLPAQEDYYSHLKKESDKPLXNLRSREHHGSYIGPWSTPTLPPPCPWPATQSQEGAAQLQGLRSWTESGGGRDRQKAKARCGVQRWGGGEDGDRKRTESWTRSLFLVPPAFLLPHAQPLWPPPLPCPVGVIISSVRCGCFA

SEQ ID NO: 801 - protein, 1475 aa, Homo Sapiens
  misc_feature (1462)..(1462): Xaa can be any naturally occurring amino acid
MALSVDSSWHRWQWRVRDGFPHCPSETTPLLSPEKGRQSYNLTQQRVVFPNNSIFHQDWEEVSRRYPGNRTCTTKYTLFTFLPRNLFEQFHRWANLYFLFLVILNWMPSMEVFHREITMLPLAIVLFVIMIKDGMEDFKRHRFDKAINCSNIRIYERKEQTYVQKCWKDVRVGDFIQMKCNEIVPADILLLFSSDPNGICHLETASLDGETNLKQRCVVKGFSQQEVQFEPELFHNTIVCEKPNNHLNKFKGYMEHPDQTRTGFGCESLLLRGCTIRNTEMAVGIVIYAGHETKAMLNNSGPRYKRSKIERRMNIDIFFCIGILILMCLIGAVGHSIWNGTFEEHPPFDVPDANGSFLPSALGGFYMFLTMIILLQVLIPISLYVSIELVKLGQVFFLSNDLDLYDEETDLSIQCRALNIAEDLGQIQYIFSDKTGTLTENKMVFRRCTIMGSEYSHQENAKRLETPKELDSDGEEWTQYQCLSFSARWAQDPATMRSQKGAQPLRRSQSARVPIQGHYRQRSMGHRESSQPPVAFSSSIEKDVTPDKNLLTKVRDAALWLETLSDSRPAKASLSTTSSIADFFLALTICNSVMVSTTTEPRQRVTIKPSSKALGTSLEKIQQLFQKLKLLSLSQSFSSTAPSDTDLGESLGANVATTDSDERDDASVCSGGDSTDDGGYRSSMWDQGDILESGSGTSLEEALEAPATDLARPEFCYEAESPDEAALVHAAHAYSFTLVSRTPEQVTVRLPQGTCLTFSLLCTLGFDSVRKRMSVVVRHPLTGEIVVYTKGADSVIMDLLEDPACVPDINMEKKLRKIRARTQKHLDLYARDGLRTLCIAKKVVSEEDFRRWASFRREAEASLDNRDELLMETAQHLENQLTLLGATGIEDRLQEGVPDTIATLREAGIQLWVLTGDKQETAVNIAHSCRLLNQTDTVYTINTENQETCESILNCALEELKQFRELQKPDRKLFGFRLPSKTPSITSEAVVPEAGLVIDGKTLNAIFQGKLEKKFLELTQYCRSVLCCRSTPLQKSMIVKLVRDKLRVMTLSIGDGANDVSMIQAADIGIGISGQEGMQAVMSSDFAITRFKHLKKLLLVHGHWCYSRLARMVVYYLYKNVCYVNLLFWYQFFCGFSSSTMIDYWQMIFFNLFFTSLPPLVFGVLDKDISAETLLALPELYKSGQNSECYNLSTFWISMVDAFYQSLICFFIPYLAYKGSDIDVFTFGTPINTISLTTILLHQAMEMKTWTIFHGVVLLGSFLMYFLVSLLYNATCVICNSPTNPYWVMEGQLSNPTFYLVCFLTPVVALLPRYFFLSLQGTCGKSLISKAQKIDKLPPDKRNLEIQSWRSRQRPAPVPEVARPTHHPVSSITGQDFSASTPKSSNPPKRKHVEESVLHEQRCGTECMRDDSCSGDSSAQLSSGEHLLGPNRIMAYSRGQTDMCRCSKRSSHRRSQSSLTIXGAAEICTNSTEAT

SEQ ID NO: 802 - protein, 1018 aa, Homo Sapiens
  misc_feature (998)..(998): Xaa can be any naturally occurring amino acid
MENAHTKTVEEVLGHFGVNESTGLSLEQVKKLKERWGSNELPAEEGKTLLELVIEQFEDLLVRILLLAACISFVLAWFEEGEETITAFVEPFVILLILVANAIVGVWQERNAENAIEALKEYEPEMGKVYRQDRKSVQRIKAKDIVPGDIVEIAVGDKVPADIRLTSIKSTTLRVDQSILTGESVSVIKHTDPVPDPRAVNQDKKNMLFSGTNIAAGKAMGVVVATGVNTEIGKIRDEMVATEQERTPLQQKLDEFGEQLSKVISLICIAVWIINIGHFNDPVHGGSWIRGAIYYFKIAVALAVAAIPEGLPAVITTCLALGTRRMAKKNAIVRSLPSVETLGCTSVICSDKTGTLTTNQMSVCRMFILDRVEGDTCSLNEFTITGSTYAPIGEVHKDDKPVNCHQYDGLVELATICALCNDSALDYNEAKGVYEKVGEATETALTCLVEKMNVFDTELKGLSKIERANACNSVIKQLMKKEFTLEFSRDRKSMSVYCTPNKPSRTSMSKMFVKGAPEGVIDRCTHIRVGSTKVPMTSGVKQKIMSVIREWGSGSDTLRCLALATHDNPLRREEMHLEDSANFIKYETNLTFVGCVGMLDPPRIEVASSVKLCRQAGIRVIMITGDNKGTAVAICRRIGIFGQDEDVTSKAFTGREFDELNPSAQRDACLNARCFARVEPSHKSKIVEFLQSFDEITAMTGDGVNDAPALKKAEIGIAMGSGTAVAKTASEMVLADDNFSTIVAAVEEGRAIYNNMKQFIRYLISSNVGEVVCIFLTAALGFPEALIPVQLLWVNLVTDGLPATALGFNPPDLDIMNKPPRNPKEPLISGWLFFRYLAIGCYVGAATVGAAAWWFIAADGGPRVSFYQLSHFLQCKEDNPDFEGVDCAIFESPYPMTMALSVLVTIEMCNALNSLSENQSLLRMPPWENIWLVGSICLSMSLHFLILYVEPLPLIFQITPLNVTQWLMVLKISLPVILMDETLKFVARNYLEPAILEXPLPKPFCRNVRVFGCVHVRF

SEQ ID NO: 803 - protein, 1052 aa, Homo Sapiens
  misc_feature (1043)..(1043): Xaa can be any naturally occurring amino acid
MENAHTKTVEEVLGHFGVNESTGLSLEQVKKLKERWGSNELPAEEGKTLLELVIEQFEDLLVRILLLAACISFVLAWFEEGEETITAFVEPFVILLILVANAIVGVWQERNAENAIEALKEYEPEMGKVYRQDRKSVQRIKAKDIVPGDIVEIAVGDKVPADIRLTSIKSTTLRVDQSILTGESVSVIKHTDPVPDPRAVNQDKKNMLFSGTNIAAGKAMGVVVATGVNTEIGKIRDEMVATEQERTPLQQKLDEFGEQLSKVISLICIAVWIINIGHFNDPVHGGSWIRGAIYYFKIAVALAVAAIPEGLPAVITTCLALGTRRMAKKNAIVRSLPSVETLGCTSVICSDKTGTLTTNQMSVCRMFILDRVEGDTCSLNEFTITGSTYAPIGEVHKDDKPVNCHQYDGLVELATICALCNDSALDYNEAKGVYEKVGEATETALTCLVEKMNVFDTELKGLSKIERANACNSVIKQLMKKEFTLEFSRDRKSMSVYCTPNKPSRTSMSKMFVKGAPEGVIDRCTHIRVGSTKVPMTSGVKQKIMSVIREWGSGSDTLRCLALATHDNPLRREEMHLEDSANFIKYETNLTFVGCVGMLDPPRIEVASSVKLCRQAGIRVIMITGDNKGTAVAICRRIGIFGQDEDVTSKAFTGREFDELNPSAQRDACLNARCFARVEPSHKSKIVEFLQSFDEITAMTGDGVNDAPALKKAEIGIAMGSGTAVAKTASEMVLADDNFSTIVAAVEEGRAIYNNMKQFIRYLISSNVGEVVCIFLTAALGFPEALIPVQLLWVNLVTDGLPATALGFNPPDLDIMNKPPRNPKEPLISGWLFFRYLAIGCYVGAATVGAAAWWFIAADGGPRVSFYQLSHFLQCKEDNPDFEGVDCAIFESPYPMTMALSVLVTIEMCNALNSLSENQSLLRMPPWENIWLVGSICLSMSLHFLILYVEPLPLIFQITPLNVTQWLMVLKISLPVILMDETLKFVARNYLEPGKECVQPATKSCSFSACTDGISWPFVLLIMPLVIWVYSTDTNFSDMFWSXLTVFHKEDV

SEQ ID NO: 804 - protein, 559 aa, Homo Sapiens
  misc_feature (530)..(530): Xaa can be any naturally occurring amino acid
MLGFVGRVAAAPASGALRRLTPSASLPPAQLLLRAAPTAVHPVRDYAAQTSPSPKAGAATGRIVAVIGAVVDVQFDEGLPPILNALEVQGRETRLVLEVAQHLGESTVRTIAMDGTEGLVRGQKVLDSGAPIKIPVGPETLGRIMNVIGEPIDERGPIKTKQFAPIHAEAPEFMEMSVEQEILVTGIKVVDLLAPYAKGGKIGLFGGAGVGKTVLIMELINNVAKAHGGYSVFAGVGERTREGNDLYHEMIESGVINLKDATSKVALVYGQMNEPPGARARVALTGLTVAEYFRDQEGQDVLLFIDNIFRFTQAGSEVSALLGRIPSAVGYQPTLATDMGTMQERITTTKKGSITSVQAIYVPADDLTDPAPATTFAHLDATTVLSRAIAELGIYPAVDPLDSTSRIMDPNIVGSEHYDVARGVQKILQDYKSLQDIIAILGMDELSEEDKLTVSRARKIQRFLSQPFQVAEVFTGHMGKLVPLKETIKGFQQILAGEYDHLPEQAFYMVGPIEEAVAKADKLAEEHSSXGVFVLCTVSLLAPNPKSFIFLCRLHKSLD

SEQ ID NO: 805 - protein, 110 aa, Homo Sapiens
  misc_feature (104)..(104): Xaa can be any naturally occurring amino acid
MAQFVRNLVEKTPALVNAAVTYSKPRLATFWYYAKVELVPPTPAEIPRAIQSLKKIVNSAQTGSFKQLTVKEAVLNGLVATEVLMWFYVGEIIGKRGIIGYDVXRPIFNI

SEQ ID NO: 806 - protein, 1504 aa, Homo Sapiens
  misc_feature (1430)..(1430): Xaa can be any naturally occurring amino acid
MVAAAAATEARLRRRTAATAALAGRSGGPHWDWDVTRAGRPGLGAGLRLPRLLSPPLRPRLLLLLLLLSPPLLLLLLPCEAEAAAAAAAVSGSAAAEAKECDRPCVNGGRCNPGTGQCVCPAGWVGEQCQHCGGRFRLTGSSGFVTDGPGNYKYKTKCTWLIEGQPNRIMRLRFNHFATECSWDHLYVYDGDSIYAPLVAAFSGLIVPERDGNETVPEVVATSGYALLHFFSDAAYNLTGFNITYSFDMCPNNCSGRGECKISNSSDTVECECSENWKGEACDIPHCTDNCGFPHRGICNSSDVRGCSCFSDWQGPGCSVPVPANQSFWTREEYSNLKLPRASHKAVVNGNIMWVVGGYMFNHSDYNMVLAYDLASREWLPLNRSVNNVVVRYGHSLALYKDKIYMYGGKIDSTGNVTNELRVFHIHNESWVLLTPKAKEQYAVVGHSAHIVTLKNGRVVMLVIFGHCPLYGYISNVQEYDLDKNTWSILHTQGALVQGGYGHSSVYDHRTRALYVHGGYKAFSANKYRLADDLYRYDVDTQMWTILKDSRFFRYLHTAVIVSGTMLVFGGNTHNDTSMSHGAKCFSSDFMAYDIACDRWSVLPRPDLHHDVNRFGHSAVLHNSTMYVFGGFNSLLLSDILVFTSEQCDAHRSEAACLAAGPGIRCVWNTGSSQCISWALATDEQEEKLKSECFSKRTLDHDRCDQHTDCYSCTANTNDCHWCNDHCVPRNHSCSEGQISIFRYENCPKDNPMYYCNKKTSCRSCALDQNCQWEPRNQECIALPENICGIGWHLVGNSCLKITTAKENYDNAKLFCRNHNALLASLTTQKKVEFVLKQLRIMQSSQSMSKLTLTPWVGLRKINVSYWCWEDMSPFTNSLLQWMPSEPSDAGFCGILSEPSTRGLKAATCINPLNGSVCERPANHSAKQCRTPCALRTACGDCTSGSSECMWCSNMKQCVDSNAYVASFPFGQCMEWYTMSTCPPENCSGYCTCSHCLEQPGCGWCTDPSNTGKGKCIEGSYKGPVKMPSQAPTGNFYPQPLLNSSMCLEDSRYNWSFIHCPACQCNGHSKCINQSICEKCENLTTGKHCETCISGFYGDPTNGGKCQPCKCNGHASLCNTNTGKCFCTTKGVKGDECQLCEVENRYQGNPLRGTCYYTLLIDYQFTFSLSQEDDRYYTAINFVATPDEQNRDLDMFINASKNFNLNITWAASFSAGTQAGEEMPVVSKTNIKEYKDSFSNEKFDFRNHPNITFFVYVSNFTWPIKIQIAFSQHSNFMDLVQFFVTFFSCFLSLLLVAAVVWKIKQSCWASRRREQLLREMQQMASRPFASVNVALETDEEPPDLIGGSIKTVPKPIALEPCFGNKAAVLSVFVRLPRGLGGIPPPGQSGLAVASALVDISQQMPIVYKEKSGAVRNRKQQPPAQPGTCIXCWGQGLSHARASEWHTRAICREGRGGEMAVRCGTEDWKPSKHLTHLHDHKLSLTVSPIRVPASNLLLLHRKYLI

SEQ ID NO: 807 - protein, 1303 aa, Homo Sapiens
  misc_feature (1273)..(1273): Xaa can be any naturally occurring amino acid
MVAAAAATEARLRRRTAATAALAGRSGGPHWDWDVTRAGRPGLGAGLRLPRLLSPPLRPRLLLLLLLLSPPLLLLLLPCEAEAAAAAAAVSGSAAAEAKECDRPCVNGGRCNPGTGQCVCPAGWVGEQCQHCGGRFRLTGSSGFVTDGPGNYKYKTKCTWLIEGQPNRIMRLRFNHFATECSWDHLYVYDGDSIYAPLVAAFSGLIVPERDGNETVPEVVATSGYALLHFFSDAAYNLTGFNITYSFDMCPNNCSGRGECKISNSSDTVECECSENWKGEACDIPHCTDNCGFPHRGICNSSDVRGCSCFSDWQGPGCSVPVPANQSFWTREEYSNLKLPRASHKAVVNGNIMWVVGGYMFNHSDYNMVLAYDLASREWLPLNRSVNNVVVRYGHSLALYKDKIYMYGGKIDSTGNVTNELRVFHIHNESWVLLTPKAKEQYAVVGHSAHIVTLKNGRVVMLVIFGHCPLYGYISNVQEYDLDKNTWSILHTQGALVQGGYGHSSVYDHRTRALYVHGGYKAFSANKYRLADDLYRYDVDTQMWTILKDSRFFRYLHTAVIVSGTMLVFGGNTHNDTSMSHGAKCFSSDFMAYDIACDRWSVLPRPDLHHDVNRFGHSAVLHNSTMYVFGGFNSLLLSDILVFTSEQCDAHRSEAACLAAGPGIRCVWNTGSSQCISWALATDEQEEKLKSECFSKRTLDHDRCDQHTDCYSCTANTNDCHWCNDHCVPRNHSCSEGQISIFRYENCPKDNPMYYCNKKTSCRSCALDQNCQWEPRNQECIALPENICGIGWHLVGNSCLKITTAKENYDNAKLFCRNHNALLASLTTQKKVEFVLKQLRIMQSSQSMSKLTLTPWVGLRKINVSYWCWEDMSPFTNSLLQWMPSEPSDAGFCGILSEPSTRGLKAATCINPLNGSVCERPANHSAKQCRTPCALRTACGDCTSGSSECMWCSNMKQCVDSNAYVASFPFGQCMEWYTMSTCPPENCSGYCTCSHCLEQPGCGWCTDPSNTGKGKCIEGSYKGPVKMPSQAPTGNFYPQPLLNSSMCLEDSRYNWSFIHCPACQCNGHSKCINQSICEKCENLTTGKHCETCISGFYGDPTNGGKCQPCKCNGHASLCNTNTGKCFCTTKGVKGDECQLCEVENRYQGNPLRGTCYYTLLIDYQFTFSLSQEDDRYYTAINFVATPDEQNRDLDMFINASKNFNLNITWAASFSAGTQAGEEMPVVSKTNIKEYKDSFSNEKFDFRNHPNITFFVYVSNFTWPIKIQVQTEQXGRMDTGRGTSHTRACCGVGGRGRDSIRGYT

SEQ ID NO: 808 - protein, 1736 aa, Homo Sapiens
  misc_feature (1585)..(1585): Xaa can be any naturally occurring amino acid
MRGQAAAPGPVWILAPLLLLLLLLGRRARAAAGADAGPGPEPCATLVQGKFFGYFSAAAVFPANASRCSWTLRNPDPRRYTLYMKVAKAPVPCSGPGRVRTYQFDSFLESTRTYLGVESFDEVLRLCDPSAPLAFLQASKQFLQMRRQQPPQHDGLRPRAGPPGPTDDFSVEYLVVGNRNPSRAACQMLCRWLDACLAGSRSSHPCGIMQTPCACLGGEAGGPAAGPLAPRGDVCLRDAVAGGPENCLTSLTQDRGGHGATGGWKLWSLWGECTRDCGGGLQTRTRTCLPAPGVEGGGCEGVLEEGRQCNREACGPAGRTSSRSQSLRSTDARRREELGDELQQFGFPAPQTGDPAAEEWSPWSVCSSTCGEGWQTRTRFCVSSSYSTQCSGPLREQRLCNNSAVCPVHGAWDEWSPWSLCSSTCGRGFRDRTRTCRPPQFGGNPCEGPEKQTKFCNIALCPGRAVDGNWNEWSSWSACSASCSQGRQQRTRECNGPSYGGAECQGHWVETRDCFLQQCPVDGKWQAWASWGSCSVTCGAGSQRRERVCSGPFFGGAACQGPQDEYRQCGTQRCPEPHEICDEDNFGAVIWKETPAGEVAAVRCPRNATGLILRRCELDEEGIAYWEPPTYIRCVSIDYRNIQMMTREHLAKAQRGLPGEGVSEVIQTLVEISQDGTSYSGDLLSTIDVLRNMTEIFRRAYYSPTPGDVQNFVQILSNLLAEENRDKWEEAQLAGPNAKELFRLVEDFVDVIGFRMKDLRDAYQVTDNLVLSIHKLPASGATDISFPMKGWRATGDWAKVPEDRVTVSKSVFSTGLTEADEASVFVVGTVLYRNLGSFLALQRNTTVLNSKVISVTVKPPPRSLRTPLEIEFAHMYNGTTNQTCILWDETDVPSSSAPPQLGPWSWRGCRTVPLDALRTRCLCDRLSTFAILAQLSADANMEKATLPSVTLIVGCGVSSLTLLMLVIIYVSVWRYIRSERSVILINFCLSIISSNALILIGQTQTRNKVVCTLVAAFLHFFFLSSFCWVLTEAWQSYMAVTGHLRNRLIRKRFLCLGWGLPALVVAISVGFTKAKGYSTMNYCWLSLEGGLLYAFVGPAAAVVLVNMVIGILVFNKLVSKDGITDKKLKERAGASLWSSCVVLPLLALTWMSAVLAVTDRRSALFQILFAVFDSLEGFVIVMVHCILRREVQDAVKCRVVDRQEEGNGDSGGSFQNGHAQLMTDFEKDVDLACRSVLNKDIAACRTATITGTLKRPSLPEEEKLKLAHAKGPPTNFNSLPANVSKLHLHGSPRYPGGPLPDFPNHSLTLKRDKAPKSSFVGDGDIFKKLDSELSRAQEKALDTSYVILPTATATLRPKPKEEPKYSIHIDQMPQTRLIHLSTAPEASLPARSPPSRQPPSGGPPEAPPAQPPPPPPPPPPPPQQPLPPPPNLEPAPPSLGDPGEPAAHPGPSTGPSTKNENVATLSVSSLERRKSRYAELDFEKIMHTRKRHQDMFQDLNRKLQHAAEKDKEVLGPDSKPEKQQTPNKRPWESLRKAHGTPTWVKKELEPLQPSPLELRSVEWERSGATIPLVGQDIIDLQTEVXAGGRRPRTGPRRRDAAPPAPAADGHRHARGQRARPAPRPQGAQTAARHRARSAGTRARCRTGGGPASGHRAPEAEGASDSALLGPRPSGQMGGRLWTVDRPSAASVPGYPPELLLRRSCLLGPAGLAPFFKHPHPSGSSQLPTPSRALGPS

SEQ ID NO: 809 - protein, 1595 aa, Homo Sapiens
  misc_feature (1586)..(1586): Xaa can be any naturally occurring amino acid
MENTGWMGKGHRMTPACPLLLSVILSLRLATAFDPAPSACSALASGVLYGAFSLQDLFPTIASGCSWTLENPDPTKYSLYLRFNRQEQVCAHFAPRLLPLDHYLVNFTCLRPSPEEAVAQAESEVGRPEEEEAEAAAGLELCSGSGPFTFLHFDKNFVQLCLSAEPSEAPRLLAPAALAFRFVEVLLINNNNSSQFTCGVLCRWSEECGRAAGRACGFAQPGCSCPGEAGAGSTTTTSPGPPAAHTLSNALVPGGPAPPAEADLHSGSSNDLFTTEMRYGEEPEEEPKVKTQWPRSADEPGLYMAQTGDPAAEEWSPWSVCSLTCGQGLQVRTRSCVSSPYGTLCSGPLRETRPCNNSATCPVHGVWEEWGSWSLCSRSCGRGSRSRMRTCVPPQHGGKACEGPELQTKLCSMAACPVEGQWLEWGPWGPCSTSCANGTQQRSRKCSVAGPAWATCTGALTDTRECSNLECPATDSKWGPWNAWSLCSKTCDTGWQRRFRMCQATGTQGYPCEGTGEEVKPCSEKRCPAFHEMCRDEYVMLMTWKKAAAGEIIYNKCPPNASGSASRRCLLSAQGVAYWGLPSFARCISHEYRYLYLSLREHLAKGQRMLAGEGMSQVVRSLQELLARRTYYSGDLLFSVDILRNVTDTFKRATYVPSADDVQRFFQVVSFMVDAENKEKWDDAQQVSPGSVHLLRVVEDFIHLVGDALKAFQSSLIVTDNLVISIQREPVSAVSSDITFPMRGRRGMKDWVRHSEDRLFLPKEVLSLSSPGKPATSGAAGSPGRGRGPGTVPPGPGHSHQRLLPADPDESSYFVIGAVLYRTLGLILPPPRPPLAVTSRVMTVTVRPPTQPPAEPLITVELSYIINGTTDPHCASWDYSRADASSGDWDTENCQTLETQAAHTRCQCQHLSTFAVLAQPPKDLTLELAGSPSVPLVIGCAVSCMALLTLLAIYAAFWRFIKSERSIILLNFCLSILASNILILVGQSRVLSKGVCTMTAAFLHFFFLSSFCWVLTEAWQSYLAVIGRMRTRLVRKRFLCLGWGLPALVVAVSVGFTRTKGYGTSSYCWLSLEGGLLYAFVGPAAVIVLVNMLIGIIVFNKLMARDGISDKSKKQRAGSERCPWASLLLPCSACGAVPSPLLSSASARNAMASLWSSCVVLPLLALTWMSAVLAMTDRRSVLFQALFAVFNSAQGFVITAVHCFLRREVQDVVKCQMGVCRADESEDSPDSCKNGQLQILSDFEKDVDLACQTVLFKEVNTCNPSTITGTLSRLSLDEDEEPKSCLVGPEGSLSFSPLPGNILVPMAASPGLGEPPPPQEANPVYMCGEGGLRQLDLTWLRPTEPGSEGDYMVLPRRTLSLQPGGGGGGGEDAPRARPEGTPRRAAKTVAHTEGYPSFLSVDHSGLGLGPAYGSLQNPYGMTFQPPPPTPSARQVPEPGERSRTMPRTVPGSTMKMGSLERKKLRYSDLDFEKVMHTRKRHSELYHELNQKFHTFDRYRSQSTAKREKRWSVSSGGAAERSVCTDKPSPGERPSLSQHRRHQSWSTFKSMTLGSLPPKPRERLTLHRAAAWEPTEPPDGDFQTEVXVPRWTAHCI

SEQ ID NO: 810 - protein, 312 aa, Homo Sapiens
  misc_feature (228)..(228): Xaa can be any naturally occurring amino acid
MGGKLSKKKKGYNVNDEKAKEKDKKAEGAATEEEGTPKESEPQAAAEPAEAKEGKEKPDQDAEGKAEEKEGEKDAAAAKEEAPKAEPEKTEGAAEAKAEPPKAPEQEQAAPGPAAGGEAPKAAEAAAAPAESAAPAAGEEPSKEEGEPKKTEAPAAPAAQETKSDGAPASDSKPGSSEAAPSSKETPAATEAPSSTPKAQGPAASAEEPKPVEAPAANSDQTVTVKEXQGQPIGKTIPLKTISSLSLSLSLYLSLYLLSLSPLLSLLSLSPILTCFKLEVMICIAQGKIQDVVPSREGGGGRIQIVFLWGNI

SEQ ID NO: 811 - protein, 404 aa, Homo Sapiens
  misc_feature (393)..(393): Xaa can be any naturally occurring amino acid
MAAAALGQIWARKLLSVPWLLCGPRRYASSSFKAADLQLEMTQKPHKKPGPGEPLVFGKTFTDHMLMVEWNDKGWGQPRIQPFQNLTLHPASSSLHYSLQLFEGMKAFKGKDQQVRLFRPWLNMDRMLRSAMRLCLPSFDKLELLECIRRLIEVDKDWVPDAAGTSLYVRPVLIGNEPSLGVSQPTRALLFVILCPVGAYFPGGSVTPVSLLADPAFIRAWVGGVGNYKLGGNYGPTVLVQQEALKRGCEQVLWLYGPDHQLTEVGTMNIFVYWTHEDGVLELVTPPLNGVILPGVVRQSLLDMAQTWGEFRVVERTITMKQLLRALEEGRVREVFGSGTACQVCPVHRILYKDRNLHIPTMENGPELILRFQKELKEIQYGIRAHEWMFPVXSCRLCSRSTDP

SEQ ID NO: 812 - protein, 615 aa, Homo Sapiens
  misc_feature (603)..(603): Xaa can be any naturally occurring amino acid
MHSKVTIICIRFLFWFLLLCMLIGKSHTEDDIIIATKNGKVRGMNLTVFGGTVTAFLGIPYAQPPLGRLRFKKPQSLTKWSDIWNATKYANSCCQNIDQSFPGFHGSEMWNPNTDLSEDCLYLNVWIPAPKPKNATVLIWIYGGGFQTGTSSLHVYDGKFLARVERVIVVSMNYRVGALGFLALPGNPEAPGNMGLFDQQLALQWVQKNIAAFGGNPKSVTLFGESAGAASVSLHLLSPGSHSLFTRAILQSGSFNAPWAVTSLYEARNRTLNLAKLTGCSRENETEIIKCLRNKDPQEILLNEAFVVPYGTPLSVNFGPTVDGDFLTDMPDILLELGQFKKTQILVGVNKDEGTAFLVYGAPGFSKDNNSIITRKEFQEGLKIFFPGVSEFGKESILFHYTDWVDDQRPENYREALGDVVGDYNFICPALEFTKKFSEWGNNAFFYYFEHRSSKLPWPEWMGVMHGYEIEFVFGLPLERRDNYTKAEEILSRSIVKRWANFAKYGNPNETQNNSTSWPVFKSTEQKYLTLNTESTRIMTKLRAQQCRFWTSFFPKVLEMTGNIDEAEWEWKAGFHRWNNYMMDWKNQFNDYTSKKESCVGLXLIDLPFIEHIFL

SEQ ID NO: 813 - protein, 129 aa, Homo Sapiens
  misc_feature (101)..(101): Xaa can be any naturally occurring amino acid
MRALTLLALLALAALCIAGQAGAKPSGAESSKGAAFVSKQEGSEVVKRPRRYLYQWLGAPVPYPDPLEPRREVCELNPDCDELADHIGFQEAYRRFYGPVXGVALLAWPATPVLLLSRHPSFLFPLPLP

SEQ ID NO: 814 - protein, 4865 aa, Homo Sapiens
  misc_feature (4858)..(4858): Xaa can be any naturally occurring amino acid
MVTGGGAAPPGTVTEPLPSVIVLSAGRKMAAAAAAASGPGCSSAAGAGAAGVSEWLVLRDGCMHCDADGLHSLSYHPALNAILAVTSRGTIKVIDGTSGATLQASALSAKPGGQVKCQYISAVDKVIFVDDYAVGCRKDLNGILLLDTALQTPVSKQDDVVQLELPVTEAQQLLSACLEKVDISSTEGYDLFITQLKDGLKNTSHETAANHKVAKWATVTFHLPHHVLKSIASAIVNELKKINQNVAALPVASSVMDRLSYLLPSARPELGVGPGRSVDRSLMYSEANRRETFTSWPHVGYRWAQPDPMAQAGFYHQPASSGDDRAMCFTCSVCLVCWEPTDEPWSEHERHSPNCPFVKGEHTQNVPLSVTLATSPAQFPCTDGTDRISCFGSGSCPHFLAAATKRGKICIWDVSKLMKVHLKFEINAYDPAIVQQLILSGDPSSGVDSRRPTLAWLEDSSSCSDIPKLEGDSDDLLEDSDSEEHSRSDSVTGHTSQKEAMEVSLDITALSILQQPEKLQWEIVANVLEDTVKDLEELGANPCLTNSKSEKTKEKHQEQHNIPFPCLLAGGLLTYKSPATSPISSNSHRSLDGLSRTQGESISEQGSTDNESCTNSELNSPLVRRTLPVLLLYSIKESDEKAGKIFSQMNNIMSKSLHDDGFTVPQIIEMELDSQEQLLLQDPPVTYIQQFADAAANLTSPDSEKWNSVFPKPGTLVQCLRLPKFAEEENLCIDSITPCADGIHLLVGLRTCPVESLSAINQVEALNNLNKLNSALCNRRKGELESNLAVVNGANISVIQHESPADVQTPLIIQPEQRNVSGGYLVLYKMNYATRIVTLEEEPIKIQHIKDPQDTITSLILLPPDILDNREDDCEEPIEDMQLTSKNGFEREKTSDISTLGHLVITTQGGYVKILDLSNFEILAKVEPPKKEGTEEQDTFVSVIYCSGTDRLCACTKGGELHFLQIGGTCDDIDEADILVDGSLSKGIEPSSEGSKPLSNPSSPGISGVDLLVDQPFTLEILTSLVELTRFETLTPRFSATVPPCWVEVQQEQQQRRHPQHLHQQHHGDAAQHTRTWKLQTDSNSWDEHVFELVLPKACMVGHVDFKFVLNSNITNIPQIQVTLLKNKAPGLGKVNALNIEVEQNGKPSLVDLNEEMQHMDVEESQCLRLCPFLEDHKEDILCGPVWLASGLDLSGHAGMLTLTSPKLVKGMAGGKYRSFLIHVKAVNERGTEEICNGGMRPVVRLPSLKHQSNKGYSLASLLAKVAAGKEKSSNVKNENTSGTRKSENLRGCDLLQEVSVTIRRFKKTSISKERVQRCAMLQFSEFHEKLLNTLCRKTDDGQITEHAQSLVLDTLCWLAGVHSNGPGSSKEGNENLLSKTRKFLSDIVRVCFFEAGRSIAHKCARFLALCISNGKCDPCQPAFGPVLLKALLDNMSFLPAATTGGSVYWYFVLLNYVKDEDLAGCSTACASLLTAVSRQLQDRLTPMEALLQTRYGLYSSPFDPVLFDLEMSGSSCKNVYNSSIGVQSDEIDLSDVLSGNGKVSSCTAAEGSFTSLTGLLEVEPLHFTCVSTSDGTRIERDDAMSSFGVTPAVGGLSSGTVGEASTALSSAAQVALQSLSHAMASAEQQLQVLQEKQQQLLKLQQQKAKLEAKLHQTTAAAAAAASAVGPVHNSVPSNPVAAPGFFIHPSDVIPPTPKTTPLFMTPPLTPPNEAVSVVINAELAQLFPGSVIDPPAVNLAAHNKNSNKSRMNPLGSGLALAISHASHFLQPPPHQSIIIERMHSGARRFVTLDFGRPILLTDVLIPTCGDLASLSIDIWTLGEEVDGRRLVVATDISTHSLILHDLIPPPVCRFMKITVIGRYGSTNARAKIPLGFYYGHTYILPWESELKLMHDPLKGEGESANQPEIDQHLAMMVALQEDIQCRYNLACHRLETLLQSIDLPPLNSANNAQYFLRKPDKAVEEDSRVFSAYQDCIQLQLQLNLAHNAVQRLKVALGASRKMLSETSNPEDLIQTSSTEQLRTIIRYLLDTLLSLLHASNGHSVPAVLQSTFHAQACEELFKHLCISGTPKIRLHTGLLLVQLCGGERWWGQFLSNVLQELYNSEQLLIFPQDRVFMLLSCIGQRSLSNSGVLESLLNLLDNLLSPLQPQLPMHRRTEGVLDIPMISWVVMLVSRLLDYVATVEDEAAAAKKPLNGNQWSFINNNLHTQSLNRSSKGSSSLDRLYSRKIRKQLVHHKQQLNLLKAKQKALVEQMEKEKIQSNKGSSYKLLVEQAKLKQATSKHFKDLIRLRRTAEWSRSNLDTEVTTAKESPEIEPLPFTLAHERCISVVQKLVLFLLSMDFTCHADLLLFVCKVLARIANATRPTIHLCEIVNEPQLERLLLLLVGTDFNRGDISWGGAWAQYSLTCMLQDILAGELLAPVAAEAMEEGTVGDDVGATAGDSDDSLQQSSVQLLETIDEPLTHDITGAPPLSSLEKDKEIDLELLQDLMEVDIDPLDIDLEKDPLAAKVFKPISSTWYDYWGADYGTYNYNPYIGGLGIPVAKPPANTEKNGSQTVSVSVSQALDARLEVGLEQQAELMLKMMSTLEADSILQALTNTSPTLSQSPTGTDDSLLGGLQAANQTSQLIIQLSSVPMLNVCFNKLFSMLQVHHVQLESLLQLWLTLSLNSSSTGNKENGADIFLYNANRIPVISLNQASITSFLTVLAWYPNTLLRTWCLVLHSLTLMTNMQLNSGSSSAIGTQESTAHLLVSDPNLIHVLVKFLSGTSPHGTNQHSPQVGPTATQAMQEFLTRLQVHLSSTCPQIFSEFLLKLIHILSTERGAFQTGQGPLDAQVKLLEFTLEQNFEVVSVSTISAVIESVTFLVHHYITCSDKVMSRSGSDSSVGARACFGGLFANLIRPGDAKAVCGEMTRDQLMFDLLKLVNILVQLPLSGNREYSARVSVTTNTTDSVSDEEKVSGGKDGNGSSTSVQGSPAYVADLVLANQQIMSQILSALGLCNSSAMAMIIGASGLHLTKHENFHGGLDAISVGDGLFTILTTLSKKASTVHMMLQPILTYMACGYMGRQGSLATCQLSEPLLWFILRVLDTSDALKAFHDMGGVQLICNNMVTSTRAIVNTARSMVSTIMKFLDSGPNKAVDSTLKTRILASEPDNAEGIHNFAPLGTITSSSPTAQPAEVLLQATPPHRRARSAAWSYIFLPEEAWCDLTIHLPAAVLLKEIHIQPHLASLATCPSSVSVEVSADGVNMLPLSTPVVTSGLTYIKIQLVKAEVASAVCLRLHRPRDASTLGLSQIKLLGLTAFGTTSSATVNNPFLPSEDQVSKTSIGWLRLLHHCLTHISDLEGMMASAAAPTANLLQTCAALLMSPYCGMHSPNIEVVLVKIGLQSTRIGLKLIDILLRNCAASGSDPTDLNSPLLFGRLNGLSSDSTIDILYQLGTTQDPGTKDRIQALLKWVSDSARVAAMKRSGRMNYMCPNSSTVEYGLLMPSPSHLHCVAAILWHSYELLVEYDLPALLDQELFELLFNWSMSLPCNMVLKKAVDSLLCSMCHVHPNYFSLLMGWMGITPPPVQCHHRLSMTDDSKKQDLSSSLTDDSKNAQAPLALTESHLATLASSSQSPEAIKQLLDSGLPSLLVRSLASFCFSHISSSESIAQSIDISQDKLRRHHVPQQCNKMPITADLVAPILRFLTEVGNSHIMKDWLGGSEVNPLWTALLFLLCHSGSTSGSHNLGAQQTSARSASLSSAATTGLTTQQRTAIENATVAFFLQCISCHPNNQKLMAQVLCELFQTSPQRGNLPTSGNISGFIRRLFLQLMLEDEKVTMFLQSPCPLYKGRINATSHVIQHPMYGAGHKFRTLHLPVSTTLSDVLDRVSDTPSITAKLISEQKDDKEKKNHEEKEKVKAENGFQDNYSVVVASGLKSQSKRAVSATPPRPPSRRGRTIPDKIGSTSGAEAANKIITVPVFHLFHKLLAGQPLPAEMTLAQLLTLLYDRKLPQGYRSIDLTVKLGSRVITDPSLSKTDSYKRLHPEKDHGDLLASCPEDEALTPGDECMDGILDESLLETCPIQSPLQVFAGMGGLALIAERLPMLYPEVIQQVSAPVVTSTTQEKPKDSDQFEWVTIEQSGELVYEAPETVAAEPPPIKSAVQTMSPIPAHSLAAFGLFLRLPGYAEVLLKERKHAQCLLRLVLGVTDDGEGSHILQSPSANVLPTLPFHVLRSLFSTTPLTTDDGVLLRRMALEIGALHLILVCLSALSHHSPRVPNSSVNQTEPQVSSSHNPTSTEEQQLYWAKGTGFGTGSTASGWDVEQALTKQRLEEEHVTCLLQVLASYINPVSSAVNGEAQSSHETRGQNSNALPSVLLELLSQSCLIPAMSSYLRNDSVLDMARHVPLYRALLELLRAIASCAAMVPLLLPLSTENGEEEEEQSECQTSVGTLLAKMKTCVDTYTNRLRSKRENVKTGVKPDASDQEPEGLTLLVPDIQKTAEIVYAATTSLRQANQEKKLGEYSKKAAMKPKPLSVLKSLEEKYVAVMKKLQFDTFEMVSEDEDGKLGFKVNYHYMSQVKNANDANSAARARRLAQEAVTLSTSLPLSSSSSVFVRCDEERLDIMKVLITGPADTPYANGCFEFDVYFPQDYPSSPPLVNLETTGGHSVRFNPNLYNDGKVCLSILNTWHGRPEEKWNPQTSSFLQVLVSVQSLILVAEPYFNEPGYERSRGTPSGTQSSREYDGNIRQATVKWAMLEQIRNPSPCFKEVIHKHFYLKRVEIMAQCEEWIADIQQYSSDKRVGRTMSHHAAALKRHTAQLREELLKLPCPEGLDPDTDDAPEVCRATTGAEETLMHDQVKPSSSKELPSDFQLXAALMWTS

SEQ ID NO: 815 - protein, 266 aa, Homo Sapiens
  misc_feature (260)..(260): Xaa can be any naturally occurring amino acid
MSKYKLIMLRHGEGAWNKENRFCSWVDQKLNSEGMEEARNCGKQLKALNFEFDLVFTSVLNRSIHTAWLILEELGQEWVPVESSWRLNERHYGALIGLNREQMALNHGEEQVRLWRRSYNVTPPPIEESHPYYQEIYNDRRYKVCDVPLDQLPRSESLKDVLERLLPYWNERIAPEVLRGKTILISAHGNSSRALLKHLEGISDEDIINITLPTGVPILLELDENLRAVGPHQFLGDQEAIQAAIKKVEDQGKVKQAKKXSFSTVG

SEQ ID NO: 816 - protein, 800 aa, Homo Sapiens
  misc_feature (678)..(678): Xaa can be any naturally occurring amino acid
MTGRVCRGCGGTDIELDAARGDAVCTACGSVLEDNIIVSEVQFVESSGGGSSAVGQFVSLDGAGKTPTLGGGFHVNLGKESRAQTLQNGRRHIHHLGNQLQLNQHCLDTAFNFFKMAVSRHLTRGRKMAHVIAACLYLVCRTEGTPHMLLDLSDLLQVNVYVLGKTFLLLARELCINAPAIDPCLYIPRFAHLLEFGEKNHEVSMTALRLLQRMKRDWMHTGRRPSGLCGAALLVAARMHDFRRTVKEVISVVKVCESTLRKRLTEFEDTPTSQLTIDEFMKIDLEEECDPPSYTAGQRKLRMKQLEQVLSKKLEEVEGEISSYQDAIEIELENSRPKAKGGLASLAKDGSTEDTASSLCGEEDTEDEELEAAASHLNKDLYRELLGGAPGSSEAAGSPEWGGRPPALGSLLDPLPTAASLGISDSIRECISSQSSDPKDASGDGELDLSGIDDLEIDRYILNESEARVKAELWMRENAEYLREQREKEARIAKEKELGIYKEHKPKKSCKRREPIQASTAREAIEKMLEQKKISSKINYSVLRGLSSAGGGSPHREDAQPEHSASARKLSRRRTPASRSGADPVTSVGKRLRPLVSTQPAKKVATGEALLPSSPTLGAEPARPQAVLVESGPVSYHADEEADEEEPDEEDGEPCVSALQMMGSNDYGCDGDEDDGYXSVASRQVMSWQGASRVSSASDGLPGPQQAGPSAETPGDRWHLSHSPRPMWNLPLGLCFYSARETGPSVCMCVIRCGPGVCRAGSRCLPSTHPRTLQGWQCGVATIKETGLGQPHCWSKCVEG

SEQ ID NO: 817 - protein, 325 aa, Homo Sapiens
  misc_feature (319)..(319): Xaa can be any naturally occurring amino acid
MAAQGCAASRLLQLLLQLLLLLLLLAAGGARARWRAEGTSAHLRDIFLGRCAEYRALLSPEQRNKNCTAIWEAFKVALDKDPCSVLPSDYDLFINLSRHSIPRDKSLFWENSHLLVNSFADNTRRFMPLSDVLYGRVADFLSWCRQKNDSGLDYQSCPTSEDCENNPVDSFWKRASIQYSKDSSGVIHVMLNGSEPTGAYPIKGFFADYEIPNLQKEKITRIEIWVMHEIGGPNVESCGEGSMKVLEKRLKDMGFQYSCINDYRPVKLLQCVDHSTHPDCALKSAAAATQRKAPSLYTEQRAGLIIPLFLVLASRTQLXLETVLL

SEQ ID NO: 818 - protein, 575 aa, Homo Sapiens
  misc_feature (544)..(544): Xaa can be any naturally occurring amino acid
MAHAHIQGGRRAKSRFVVCIMSGARSKLALFLCGCYVVALGAHTGEESVADHHEAEYYVAAVYEHPSILSLNPLALISRQEALELMNQNLDIYEQQVMTAAQKDVQIIVFPEDGIHGFNFTRTSIYPFLDFMPSPQVVRWNPCLEPHRFNDTEVLQRLSCMAIRGDMFLVANLGTKEPCHSSDPRCPKDGRYQFNTNVVFSNNGTLVDRYRKHNLYFEAAFDVPLKVDLITFDTPFAGRFGIFTCFDILFFDPAIRVLRDYKVKHVVYPTAWMNQLPLLAAIEIQKAFAVAFGINVLAANVHHPVLGMTGSGIHTPLESFWYHDMENPKSHLIIAQVAKNPVGLIGAENATGETDPSHSKFLKILSGDPYCEKDAQEVHCDEATKWNVNAPPTFHSEMMYDNFTLVPVWGKEGYLHVCSNGLCCYLLYERPTLSKELYALGVFDGLHTVHGTYYIQVCALVRCGGLGFDTCGQEITEATGIFEFHLWGNFSTSYIFPLFLTSGMTLEVPDQLGWENDHYFLRKSRLSSGLVTAALYGRLYERDXEKCVVCGADSGHHVDSLALPQATSPGTIFLP

SEQ ID NO: 819 - protein, 402 aa, Homo Sapiens
  misc_feature (397)..(397): Xaa can be any naturally occurring amino acid
MLPSLQESMDGDEKELESSEEGGSAEERRLEPPSSSHYCLYSYRGSRLAQQRGDSEDGSPSGTNAETPSGDDFSLSLADTNLPSEVEPELRSFIAKRLSRGAVFEGLGNVASVELKIPGYRVGCYYCLFQNEKLLPETVTIDSERNPSEYVVCFLGGSEKGLELFRLELDKYIQGLKNNMNCEARGLESHIKSYLSSWFEDVVCPIQRVVLLFQEKLTFLLHAALSYTPVEVKESDEKTKRDINRFLSVASLQGLIHEGTMTSLCMAMTEEQHKSVVIDCSSSQPQFCNAGSNRFCEDWMQAFLNGAKGGNPFLFRQVLENFKLKAIQDTNNLKRFIRQAEMNHYALFKCYMFLKNCGSGDILLKIVKVEHEEMPEAKNVIAVLEEFMKEALDQSFXSYVLR

SEQ ID NO: 820 - protein, 264 aa, Homo Sapiens
  misc_feature (246)..(246): Xaa can be any naturally occurring amino acid
MEGPRGWLVLCVLAISLASMVTEDLCRAPDGKKGEAGRPGRRGRPGLKGEQGEPGAPGIRTGIQGLKGDQGEPGPSGNPGKVGYPGPSGPLGARGIPGIKGTKGSPGNIKDQPRPAFSAIRRNPPMGGNVVIFDTVITNQEEPYQNHSGRFVCTVPGYYYFTFQVLSQWEICLSIVSSSRGQVRRSLGFCDTTNKGLFQVVSGGMVLQLQQGDQVWVEKDPKKGHIYQGSEADSVFSGFLIFPSAXAREGPPPPPTSLASMLRL

SEQ ID NO: 821 - protein, 288 aa, Homo Sapiens
  misc_feature (254)..(254): Xaa can be any naturally occurring amino acid
MMMKIPWGSIPVLMLLLLLGLIDISQAQLSCTGPPAIPGIPGIPGTPGPDGQPGTPGIKGEKGLPGLAGDHGEFGEKGDPGIPGNPGKVGPKGPMGPKGGPGAPGAPGPKGESGDYKATQKIAFSATRTINVPLRRDQTIRFDHVITNMNNNYEPRSGKFTCKVPGLYYFTYHASSRGNLCVNLMRGRERAQKVVTFCDYAYNTFQVTTGGMVLKLEQGENVFLQATDKNSLLGMEGANSIFSGFLLFPDMEAXPVGCFTSTPAPPASNAHSTPNTTPCPTNAHSRAW

SEQ ID NO: 822 - protein, 276 aa, Homo Sapiens
  misc_feature (246)..(246): Xaa can be any naturally occurring amino acid
MDVGPSSLPHLGLKLLLLLLLLPLRGQANTGCYGIPGMPGLPGAPGKDGYDGLPGPKGEPGIPAIPGIRGPKGQKGEPGLPGHPGKNGPMGPPGMPGVPGPMGIPGEPGEEGRYKQKFQSVFTVTRQTHQPPAPNSLIRFNAVLTNPQGDYDTSTGKFTCKVPGLYYFVYHASHTANLCVLLYRSGVKVVTFCGHTSKTNQVNSGGVLLRLQVGEEVWLAVNDYYDMVGIQGSDSVFSGFLLFPDXGGQMRSSPTGLPPPSASCMDPPYWPVCILA

SEQ ID NO: 823 - protein, 738 aa, Homo Sapiens
  misc_feature (706)..(706): Xaa can be any naturally occurring amino acid
MWLLYLLVPALFCRAGGSIPIPQKLFGEVTSPLFPKPYPNNFETTTVITVPTGYRVKLVFQQFDLEPSEGCFYDYVKISADKKSLGRFCGQLGSPLGNPPGKKEFMSQGNKMLLTFHTDFSNEENGTIMFYKGFLAYYQAVDLDECASRSKLGEEDPQPQCQHLCHNYVGGYFCSCRPGYELQEDRHSCQAECSSELYTEASGYISSLEYPRSYPPDLRCNYSIRVERGLTLHLKFLEPFDIDDHQQVHCPYDQLQIYANGKNIGEFCGKQRPPDLDTSSNAVDLLFFTDESGDSRGWKLRYTTEIIKCPQPKTLDEFTIIQNLQPQYQFRDYFIATCKQGYQLIEGNQVLHSFTAVCQDDGTWHRAMPRCKIKDCGQPRNLPNGDFRYTTTMGVNTYKARIQYYCHEPYYKMQTRAGSRESEQGVYTCTAQGIWKNEQKGEKIPRCLPVCGKPVNPVEQRQRIIGGQKAKMGNFPWQVFTNIHGRGGGALLGDRWILTAAHTLYPKEHEAQSNASLDVFLGHTNVEELMKLGNHPIRRVSVHPDYRQDESYNFEGDIALLELENSVTLGPNLLPICLPDNDTFYDLGLMGYVSGFGVMEEKIAHDLRFVRLPVANPQACENWLRGKNRMDVFSQNMFCAGHPSLKQDACQGDSGGVFAVRDPNTDRWVATGIVSWGIGCSRGYGFYTKVLNYVDWIKKEMEEEDXAQNSLGSNPESSVEKKKQKTTDQLLITTKSLY

SEQ ID NO: 824 - protein, 717 aa, Homo Sapiens
  misc_feature (689)..(689): Xaa can be any naturally occurring amino acid
MWCIVLFSLLAWVYAEPTMYGEILSPNYPQAYPSEVEKSWDIEVPEGYGIHLYFTHLDIELSENCAYDSVQIISGDTEEGRLCGQRSSNNPHSPIVEEFQVPYNKLQVIFKSDFSNEERFTGFAAYYVATDINECTDFVDVPCSHFCNNFIGGYFCSCPPEYFLHDDMKNCGVNCSGDVFTALIGEIASPNYPKPYPENSRCEYQIRLEKGFQVVVTLRREDFDVEAADSAGNCLDSLVFVAGDRQFGPYCGHGFPGPLNIETKSNALDIIFQTDLTGQKKGWKLRYHGDPMPCPKEDTPNSVWEPAKAKYVFRDVVQITCLDGFEVVEGRVGATSFYSTCQSNGKWSNSKLKCQPVDCGIPESIENGKVEDPESTLFGSVIRYTCEEPYYYMENGGGGEYHCAGNGSWVNEVLGPELPKCVPVCGVPREPFEEKQRIIGGSDADIKNFPWQVFFDNPWAGGALINEYWVLTAAHVVEGNREPTMYVGSTSVQTSRLAKSKMLTPEHVFIHPGWKLLEVPEGRTNFDNDIALVRLKDPVKMGPTVSPICLPGTSSDYNLMDGDLGLISGWGRTEKRDRAVRLKAARLPVAPLRKCKEVKVEKPTADAEAYVFTPNMICAGGEKGMDSCKGDSGGAFAVQDPNDKTKFYAAGLVSWGPQCGTYGLYTRVKNYVDWIMKTMQENSTPREDXSRYIPPASPRVVTNALPSVPYDILIISS

SEQ ID NO: 825 - protein, 778 aa, Homo Sapiens
  misc_feature (753)..(753): Xaa can be any naturally occurring amino acid
MGPLMVLFCLLFLYPGLADSAPSCPQNVNISGGTFTLSHGWAPGSLLTYSCPQGLYPSPASRLCKSSGQWQTPGATRSLSKAVCKPVRCPAPVSFENGIYTPRLGSYPVGGNVSFECEDGFILRGSPVRQCRPNGMWDGETAVCDNGAGHCPNPGISLGAVRTGFRFGHGDKVRYRCSSNLVLTGSSERECQGNGVWSGTEPICRQPYSYDFPEDVAPALGTSFSHMLGATNPTQKTKESLGRKIQIQRSGHLNLYLLLDCSQSVSENDFLIFKESASLMVDRIFSFEINVSVAIITFASEPKVLMSVLNDNSRDMTEVISSLENANYKDHENGTGTNTYAALNSVYLMMNNQMRLLGMETMAWQEIRHAIILLTDGKSNMGGSPKTAVDHIREILNINQKRNDYLDIYAIGVGKLDVDWRELNELGSKKDGERHAFILQDTKALHQVFEHMLDVSKLTDTICGVGNMSANASDQERTPWHVTIKPKSQETCRGALISDQWVLTAAHCFRDGNDHSLWRVNVGDPKSQWGKEFLIEKAVISPGFDVFAKKNQGILEFYGDDIALLKLAQKVKMSTHARPICLPCTMEANLALRRPQGSTCRDHENELLNKQSVPAHFVALNGSKLNINLKMGVEWTSCAEVVSQEKTMFPNLTDVREVVTDQFLCSGTQEDESPCKGESGGAVFLERRFRFFQVGLVSWGLYNPCLGSADKNSRKRAPRSKVPPPRDFHINLFRMQPWLRQHLGDVLNFLPLXPWPLSPLLPCQNLPPLHLLPLNGHP

SEQ ID NO: 826 - protein, 1232 aa, Homo Sapiens
  misc_feature (1178)..(1178): Xaa can be any naturally occurring amino acid
MDVYPPRRQGLPRARSPGGSSRGSPSVSCSRLRQVQSILTQSSKSRPDGILCILGIDSRYNEGCRELANYLLFGLYNQNTSDFEKTGFSEEVLDDVIILIKSDSVHLYCNPVNFRYLLPYVAHWRNLHFHCMTENEYEDEEAAEEFKITSFVDMVRDCSRIGIPYSSQGHLQIFDMFVVEKWPIVQAFALEGIGGDGFFTMKYELQDVSLNLWNVYSKMDPMSLESLLSDDLVAFEHQWTSFFANFDTEIPFLLELSESQAGEPFRSYFSHGMISSHITENSPNRQPFVLFGNHSTRENLNAGNFNFPSEGHLVRSTGPGGSFAKHMVAQCVSPKGPLACSRTYFFGATHVPYLGGDSKLPKKTEQIRLLSQIYAAVIEAVLAGIACYAKTSSLTKAKEVAEQTLGSGLDSFELIPFKAALRSKMTFHIHAVNNQGRIVPLDSEDSLSFVKTACMAVYDIPDLLGGNGCLGSVVFSESFLTSQILVKEKDGTVTTETSSVVLTAAVPRFCSWLVEDNEVKLSEKTQQAVRGDESFLGTYLTGGEGAYLYSSNLQSWPEEGNVHFFSSGLLFSHCRHRSIIISKDHMNSISFYDGDSTSTVAALLIDFKSSLLPHLPVHFHGSSNFLMIALFPKSKIYQAFYSEVFSLWKQQDNSGISLKVIQEDGLSVEQKRLHSSAQKLFSALSQPAGEKRSSLKLLSAKLPELDWFLQHFAISSISQEPVMRTHLPVLLQQAEINTTHRIESDKVIISIVTGLPGCHASELCAFLVTLHKECGRWMVYRQIMDSSECFHAAHFQRYLSSALEAQQNRSARQSAYIRKKTRLLVVLQGYTDVIDVVQALQTHPDSNVKASFTIGAITACVEPMSCYMEHRFLFPKCLDQCSQGLVSNVVFTSHTTEQRHPLLVQLQSLIRAANPAAAFILAENGIVTRNEDIELILSENSFSSPEMLRSRYLMYPGWYEGKLNAGSVYPLMVQICVWFGRPLEKTRFVAKCKAIQSSIKPSPFSGNIYHILGKVKFSDSERTMEVCYNTLANSLSIMPVLEGPTPPPDSKSVSQDSSGQQECYLVFIGCSLKEDSIKDWLRQSAKQKPQRKALKTRGMLTQQEIRSIHVKRHLEPLPAGYFYNGTQFVNFFGDKTDFHPLMDQFMNDYVEEANREIEKYNQELEQQEYHDLFELKPXRKAGPVRPAECPPWRWTNGCLNLSSAGGLSLKGLSLFSLACVGWLECMLSLFPV

SEQ ID NO: 827 - protein, 458 aa, Homo Sapiens
  misc_feature (417)..(417): Xaa can be any naturally occurring amino acid
MSEADGLRQRRPLRPQVVTDDDGQAPEAKDGSSFSGRVFRVTFLMLAVSLTVPLLGAMMLLESPIDPQPLSFKEPPLLLGVLHPNTKLRQAERLFENQLVGPESIAHIGDVMFTGTADGRVVKLENGEIETIARFGSGPCKTRDDEPVCGRPLGIRAGPNGTLFVADAYKGLFEVNPWKREVKLLLSSETPIEGKNMSFVNDLTVTQDGRKIYFTDSSSKWQRRDYLLLVMEGTDDGRLLEYDTVTREVKVLLDQLRFPNGVQLSPAEDFVLVAETTMARIRRVYVSGLMKGGADLFVENMPGFPDNIRPSSSGGYWVGMSTIRPNPGFSMLDFLSERPWIKRMIFKLFSQETVMKFVPRYSLVLELSDSGAFRRSLHDPDGLVATYISEVHEHDGHLYLGSFRSPFLCRLSLQAVXPSQIAAPATQARSLHTQAPGLVQEELWTQSWFKCPHAPVSP

SEQ ID NO: 828 - protein, 789 aa, Homo Sapiens
  misc_feature (782)..(782): Xaa can be any naturally occurring amino acid
MAHRPKRTFRQRAADSSDSDGAEESPAEPGAPRELPVPGSAEEEPPSGGGRAQVAGLPHRVRGPRGRGRVWASSRRATKAAPRADEGSESRTLDVSTDEEDKIHHSSESKDDQGLSSDSSSSLGEKELSSTVKIPDAAFIQAARRKRELARAQDDYISLDVQHTSSISGMKRESEDDPESEPDDHEKRIPFTLRPQTLRQRMAEESISRNEETSEESQEDEKQDTWEQQQMRKAVKIIEERDIDLSCGNGSSKVKKFDTSISFPPVNLEIIKKQLNTRLTLLQETHRSHLREYEKYVQDVKSSKSTIQNLESSSNQALNCKFYKSMKIYVENLIDCLNEKIINIQEIESSMHALLLKQAMTFMKRRQDELKHESTYLQQLSRKDETSTSGNFSVDEKTQWILEEIESRRTKRRQARVLSGNCNHQEGTSSDDELPSAEMIDFQKSQGDILQKQKKVFEEVQDDFCNIQNILLKFQQWREKFPDSYYEAFISLCIPKLLNPLIRVQLIDWNPLKLESTGLKEMPWFKSVEEFMDSSVEDSKKESSSDKKVLSAIINKTIIPRLTDFVEFLWDPLSTSQTTSLITHCRVILEEHSTCENEVSKSRQDLLKSIVSRMKKAVEDDVFIPLYPKSAVENKTSPHSKFQERQFWSGLKLFRNILLWNGLLTDDTLQELGLGKLLNRYLIIALLNATPGPDVVKKCNQVAACLPEKWFENSAMRTSIPQLENFIQFLLQSAHKLSRSEFRDEVEEIILILVKIKALNQAESFIGEHHLDHLKSLIKEDXINFIGKC

SEQ ID NO: 829 - protein, 637 aa, Homo Sapiens
  misc_feature (598)..(598): Xaa can be any naturally occurring amino acid
MHPPKTPSGALHRKRKMAAWPFSRLWKVSDPILFQMTLIAALLPAVLGNCGPPPTLSFAAPMDITLTETRFKTGTTLKYTCLPGYVRSHSTQTLTCNSDGEWVYNTFCIYKRCRHPGELRNGQVEIKTDLSFGSQIEFSCSEGFFLIGSTTSRCEVQDRGVGWSHPLPQCEIVKCKPPPDIRNGRHSGEENFYAYGFSVTYSCDPRFSLLGHASISCTVENETIGVWRPSPPTCEKITCRKPDVSHGEMVSGFGPIYNYKDTIVFKCQKGFVLRGSSVIHCDADSKWNPSPPACEPNSCINLPDIPHASWETYPRPTKEDVYVVGTVLRYRCHPGYKPTTDEPTTVICQKNLRWTPYQGCEALCCPEPKLNNGEITQHRKSRPANHCVYFYGDEISFSCHETSRFSAICQGDGTWSPRTPSCGDICNFPPKIAHGHYKQSSSYSFFKEEIIYECDKGYILVGQAKLSCSYSHWSAPAPQCKALCRKPELVNGRLSVDKDQYVEPENVTIQCDSGYGVVGPQSITCSGNRTWYPEVPKCEWETPEGCEQVLTGKRLMQCLPNPEDVKMALEVYKLSLEIEQLELQRDSARQSTLDKELXFFSKEGGKGVLLACLLQFNTDQFSKSTVNLAVIFIIINI

SEQ ID NO: 830 - protein, 256 aa, Homo Sapiens
  misc_feature (253)..(253): Xaa can be any naturally occurring amino acid
MFFWCACCLMVAWRVSASDAEHCPELPPVDNSIFVAKEVEGQILGTYVCIKGYHLVGKKTLFCNASKEWDNTTTECRLGHCPDPVLVNGEFSSSGPVNVSDKITFMCNDHYILKGSNRSQCLEDHTWAPPFPICKSRDCDPPGNPVHGYFEGNNFTLGSTISYYCEDRYYLVGVQEQQCVDGEWSSALPVCKLIQEAPKPECEKALLAFQESKNLCEAMENFMQQLKESGMTMEELKYSLELKKAELKAKLLXHYS

SEQ ID NO: 831 - protein, 255 aa, Homo Sapiens
  misc_feature (252)..(252): Xaa can be any naturally occurring amino acid
MFFWCACCLMVAWRVSASDEHCPELPPVDNSIFVAKEVEGQILGTYVCIKGYHLVGKKTLFCNASKEWDNTTTECRLGHCPDPVLVNGEFSSSGPVNVSDKITFMCNDHYILKGSNRSQCLEDHTWAPPFPICKSRDCDPPGNPVHGYFEGNNFTLGSTISYYCEDRYYLVGVQEQQCVDGEWSSALPVCKLIQEAPKPECEKALLAFQESKNLCEAMENFMQQLKESGMTMEELKYSLELKKAELKAKLLXHYS

SEQ ID NO: 832 - protein, 602 aa, Homo Sapiens
  misc_feature (585)..(585): Xaa can be any naturally occurring amino acid
MFAVVFFILSLMTCQPGVTAQEKVNQRVRRAATPAAVTCQLSNWSEWTDCFPCQDKKYRHRSLLQPNKFGGTICSGDIWDQASCSSSTTCVRQAQCGQDFQCKETGRCLKRHLVCNGDQDCLDGSDEDDCEDVRAIDEDCSQYEPIPGSQKAALGYNILTQEDAQSVYDASYYGGQCETVYNGEWRELRYDSTCERLYYGDDEKYFRKPYNFLKYHFEALADTGISSEFYDNANDLLSKVKKDKSDSFGVTIGIGPAGSPLLVGVGVSHSQDTSFLNELNKYNEKKFIFTRIFTKVQTAHFKMRKDDIMLDEGMLQSLMELPDQYNYGMYAKFINDYGTHYITSGSMGGIYEYILVIDKAKMESLGITSRDITTCFGGSLGIQYEDKINVGGGLSGDHCKKFGGGKTERARKAMAVEDIISRVRGGSSGWSGGLAQNRSTITYRSWGRSLKYNPVVIDFEMQPIHEVLRHTSLGPLEAKRQNLRRALDQYLMEFNACRCGPCFNNGVPILEGTSCRCQCRLGSLGAACEQTQTEGAKADGSWSCWSSWSVCRAGIQERRRECDNPAPQNGGASCPGRKVQTQACXGPLDTGWTRCCGCRPLH

SEQ ID NO: 833 - protein, 565 aa, Homo Sapiens
  misc_feature (560)..(560): Xaa can be any naturally occurring amino acid
MSACRSFAVAICILEISILTAQYTTSYDPELTESSGSASHIDCRMSPWSEWSQCDPCLRQMFRSRSIEVFGQFNGKRCTDAVGDRRQCVPTEPCEDAEDDCGNDFQCSTGRCIKMRLRCNGDNDCGDFSDEDDCESEPRPPCRDRVVEESELARTAGYGINILGMDPLSTPFDNEFYNGLCNRDRDGNTLTYYRRPWNVASLIYETKGEKNFRTEHYEEQIEAFKSIIQEKTSNFNAAISLKFTPTETNKAEQCCEETASSISLHGKGSFRFSYSKNETYQLFLSYSSKKEKMFLHVKGEIHLGRFVMRNRDVVLTTTFVDDIKALPTTYEKGEYFAFLETYGTHYSSSGSLGGLYELIYVLDKASMKRKGVELKDIKRCLGYHLDVSLAFSEISVGAEFNKDDCVKRGEGRAVNITSENLIDDVVSLIRGGTRKYAFELKEKLLRGTVIDVTDFVNWASSINDAPVLISQKLSPIYNLVPVKMKNAHLKKQNLERAIEDYINEFSVRKCHTCQNGGTVILMDGKCLCACPFKFEGIACEISKQKISEGLPALEFPNEKXSCWLL

SEQ ID NO: 834 - protein, 279 aa, Homo Sapiens
  misc_feature (261)..(261): Xaa can be any naturally occurring amino acid
MSHHWGYGKHNGPEHWHKDFPIAKGERQSPVDIDTHTAKYDPSLKPLSVSYDQATSLRILNNGHAFNVEFDDSQDKAVLKGGPLDGTYRLIQFHFHWGSLDGQGSEHTVDKKKYAAELHLVHWNTKYGDFGKAVQQPDGLAVLGIFLKVGSAKPGLQKVVDVLDSIKTKGKSADFTNFDPRGLLPESLDYWTYPGSLTTPPLLECVTWIVLKEPISVSSEQVLKFRKLNFNGEGEPEELMVDNWRPAQPLKNRQIKASFKXDGPIVCIQIMNLRVFPFS

SEQ ID NO: 835 - protein, 299 aa, Homo Sapiens
  misc_feature (261)..(261): Xaa can be any naturally occurring amino acid
MAKEWGYASHNGPDHWHELFPNAKGENQSPVELHTKDIRHDPSLQPWSVSYDGGSAKTILNNGKTCRVVFDDTYDRSMLRGGPLPGPYRLRQFHLHWGSSDDHGSEHTVDGVKYAAELHLVHWNPKYNTFKEALKQRDGIAVIGIFLKIGHENGEFQIFLDALDKIKTKGKEAPFTKFDPSCLFPACRDYWTYQGSFTTPPCEECIVWLLLKEPMTVSSDQMAKLRSLLSSAENEPPVPLVSNWRPPQPINNRVVRASFKXGCWILPSSGKETYHWRAWFLASFWCSYSKSISFFHTEQ

SEQ ID NO: 836 - protein, 2205 aa, Homo Sapiens
  misc_feature (2182)..(2182): Xaa can be any naturally occurring amino acid
MMMMMMMKKMQHQRQQQADHANEANYARGTRLPLSGEGPTSQPNSSKQTVLSWQAAIDAARQAKAAQTMSTSAPPPVGSLSQRKRQQYAKSKKQGNSSNSRPARALFCLSLNNPIRRACISIVEWKPFDIFILLAIFANCVALAIYIPFPEDDSNSTNHNLEKVEYAFLIIFTVETFLKIIAYGLLLHPNAYVRNGWNLLDFVIVIVGLFSVILEQLTKETEGGNHSSGKSGGFDVKALRAFRVLRPLRLVSGVPSLQVVLNSIIKAMVPLLHIALLVLFVIIIYAIIGLELFIGKMHKTCFFADSDIVAEEDPAPCAFSGNGRQCTANGTECRSGWVGPNGGITNFDNFAFAMLTVFQCITMEGWTDVLYWVNDAIGWEWPWVYFVSLIILGSFFVLNLVLGVLSGEFSKEREKAKARGDFQKLREKQQLEEDLKGYLDWITQAEDIDPENEEEGGEEGKRNTSMPTSETESVNTENVSGEGENRGCCGSLWCWWRRRGAAKAGPSGCRRWGQAISKSKLSRRWRRWNRFNRRRCRAAVKSVTFYWLVIVLVFLNTLTISSEHYNQPDWLTQIQDIANKVLLALFTCEMLVKMYSLGLQAYFVSLFNRFDCFVVCGGITETILVELEIMSPLGISVFRCVRLLRIFKVTRHWTSLSNLVASLLNSMKSIASLLLLLFLFIIIFSLLGMQLFGGKFNFDETQTKRSTFDNFPQALLTVFQILTGEDWNAVMYDGIMAYGGPSSSGMIVCIYFIILFICGNYILLNVFLAIAVDNLADAESLNTAQKEEAEEKERKKIARKESLENKKNNKPEVNQIANSDNKVTIDDYREEDEDKDPYPPCDVPVGEEEEEEEEDEPEVPAGPRPRRISELNMKEKIAPIPEGSAFFILSKTNPIRVGCHKLINHHIFTNLILVFIMLSSAALAAEDPIRSHSFRNTILGYFDYAFTAIFTVEILLKMTTFGAFLHKGAFCRNYFNLLDMLVVGVSLVSFGIQSSAISVVKILRVLRVLRPLRAINRAKGLKHVVQCVFVAIRTIGNIMIVTTLLQFMFACIGVQLFKGKFYRCTDEAKSNPEECRGLFILYKDGDVDSPVVRERIWQNSDFNFDNVLSAMMALFTVSTFEGWPALLYKAIDSNGENIGPIYNHRVEISIFFIIYIIIVAFFMMNIFVGFVIVTFQEQGEKEYKNCELDKNQRQCVEYALKARPLRRYIPKNPYQYKFWYVVNSSPFEYMMFVLIMLNTLCLAMQHYEQSKMFNDAMDILNMVFTGVFTVEMVLKVIAFKPKGYFSDAWNTFDSLIVIGSIIDVALSEADPTESENVPVPTATPGNSEESNRISITFFRLFRVMRLVKLLSRGEGIRTLLWTFIKSFQALPYVALLIAMLFFIYAVIGMQMFGKVAMRDNNQINRNNNFQTFPQAVLLLFRCATGEAWQEIMLACLPGKLCDPESDYNPGEEYTCGSNFAIVYFISFYMLCAFLIINLFVAVIMDNFDYLTRDWSILGPHHLDEFKRIWSEYDPEAKGRIKHLDVVTLLRRIQPPLGFGKLCPHRVACKRLVAMNMPLNSDGTVMFNATLFALVRTALKIKTEGNLEQANEELRAVIKKIWKKTSMKLLDQVVPPAGDDEVTVGKFYATFLIQDYFRKFKKRKEQGLVGKYPAKNTTIALQAGLRTLHDIGPEIRRAISCDLQDDEPEETKREEEDDVFKRNGALLGNHVNHVNSDRRDSLQQTNTTHRPLHVQRPSIPPASDTEKPLFPPAGNSVCHNHHNHNSIGKQVPTSTNANLNNANMSKAAHGKRPSIGNLEHVSENGHHSSHKHDREPQRRSSVKRTRYYETYIRSDSGDEQLPTICREDPEIHGYFRDPHCLGEQEYFSSEECYEDDSSPTWSRQNYGYYSRYPGRNIDSERPRGYHHPQGFLEDDDSPVCYDSRRSPRRRLLPPTPASHRRSSFNFECLRRQSSQEEVPSSPIFPHRTALPLHLMQQQIMAVAGLDSSKAQKYSPSHSTRSWATPPATPPYRDWTPCYTPLIQVEQSEALDQVNGSLPSLHRSSWYTDEPDISYRTFTPASLTVPSSFRNKNSDKQRSADSLVEAVLISEGLGRYARDPKFVSATKHEIADACDLTIDEMESAASTLLNGNVRPRANGDVGPLSHRQDYELQDFGPGYSDEEPDPGRDEEDLADEMICITTLXPPARGRLALASGGAQESQGKSAS

SEQ ID NO: 837 - protein, 2394 aa, Homo Sapiens
  misc_feature (2378)..(2378): Xaa can be any naturally occurring amino acid
MDEEEDGAGAEESGQPRSFMRLNDLSGAGGRPGPGSAEKDPGSADSEAEGLPYPALAPVVFFYLSQDSRPRSWCLRTVCNPWFERISMLVILLNCVTLGMFRPCEDIACDSQRCRILQAFDDFIFAFFAVEMVVKMVALGIFGKKCYLGDTWNRLDFFIVIAGMLEYSLDLQNVSFSAVRTVRVLRPLRAINRVPSMRILVTLLLDTLPMLGNVLLLCFFVFFIFGIVGVQLWAGLLRNRCFLPENFSLPLSVDLERYYQTENEDESPFICSQPRENGMRSCRSVPTLRGDGGGGPPCGLDYEAYNSSSNTTCVNWNQYYTNCSAGEHNPFKGAINFDNIGYAWIAIFQVITLEGWVDIMYFVMDAHSFYNFIYFILLIIVGSFFMINLCLVVIATQFSETKQRESQLMREQRVRFLSNASTLASFSEPGSCYEELLKYLVYILRKAARRLAQVSRAAGVRVGLLSSPAPLGGQETQPSSSCSRSHRRLSVHHLVHHHHHHHHHYHLGNGTLRAPRASPEIQDRDANGSRRLMLPPPSTPALSGAPPGGAESVHSFYHADCHLEPVRCQAPPPRSPSEASGRTVGSGKVYPTVHTSPPPETLKEKALVEVAASSGPPTLTSLNIPPGPYSSMHKLLETQSTGACQSSCKISSPCLKADSGACGPDSCPYCARAGAGEVELADREMPDSDSEAVYEFTQDAQHSDLRDPHSRRQRSLGPDAEPSSVLAFWRLICDTFRKIVDSKYFGRGIMIAILVNTLSMGIEYHEQPEELTNALEISNIVFTSLFALEMLLKLLVYGPFGYIKNPYNIFDGVIVVISVWEIVGQQGGGLSVLRTFRLMRVLKLVRFLPALQRQLVVLMKTMDNVATFCMLLMLFIFIFSILGMHLFGCKFASERDGDTLPDRKNFDSLLWAIVTVFQILTQEDWNKVLYNGMASTSSWAALYFIALMTFGNYVLFNLLVAILVEGFQAEEISKREDASGQLSCIQLPVDSQGGDANKSESEPDFFSPSLDGDGDRKKCLALVSLGEHPELRKSLLPPLIIHTAATPMSLPKSTSTGLGEALGPASRRTSSSGSAEPGAAHEMKSPPSARSSPHSPWSAASSWTSRRSSRNSLGRAPSLKRRSPSGERRSLLSGEGQESQDEEESSEEERASPAGSDHRHRGSLEREAKSSFDLPDTLQVPGLHRTASGRGSASEHQDCNGKSASGRLARALRPDDPPLDGDDADDEGNLSKGERVRAWIRARLPACCLERDSWSAYIFPPQSRFRLLCHRIITHKMFDHVVLVIIFLNCITIAMERPKIDPHSAERIFLTLSNYIFTAVFLAEMTVKVVALGWCFGEQAYLRSSWNVLDGLLVLISVIDILVSMVSDSGTKILGMLRVLRLLRTLRPLRVISRAQGLKLVVETLMSSLKPIGNIVVICCAFFIIFGILGVQLFKGKFFVCQGEDTRNITNKSDCAEASYRWVRHKYNFDNLGQALMSLFVLASKDGWVDIMYDGLDAVGVDQQPIMNHNPWMLLYFISFLLIVAFFVLNMFVGVVVENFHKCRQHQEEEEARRREEKRLRRLEKKRRNLMLDDVIASGSSASAASEAQCKPYYSDYSRFRLLVHHLCTSHYLDLFITGVIGLNVVTMAMEHYQQPQILDEALKICNYIFTVIFVLESVFKLVAFGFRRFFQDRWNQLDLAIVLLSIMGITLEEIEVNASLPINPTIIRIMRVLRIARVLKLLKMAVGMRALLDTVMQALPQVGNLGLLFMLLFFIFAALGVELFGDLECDETHPCEGLGRHATFRNFGMAFLTLFRVSTGDNWNGIMKDTLRDCDQESTCYNTVISPIYFVSFVLTAQFVLVNVVIAVLMKHLEESNKEAKEEAELEAELELEMKTLSPQPHSPLGSPFLWPGVEGPDSPDSPKPGALHPAAHARSASHFSLEHPTDRQLFDTISLLIQGSLEWELKLMDELAGPGGQPSAFPSAPSLGGSDPQIPLAEMEALSLTSEIVSEPSCSLALTDDSLPDDMHTLLLSALESNMQPHPTELPGPDLLTVRKSGVSRTHSLPNDSYMCRHGSTAEGPLGHRGWGLPKAQSGSVLSVHSQPADTSYILQLPKDAPHLLQPHSAPTWGTIPKLPPPGRSPLAQRPLRRQAAIRTDSLDVQGLGSREDLLAEVSGPSPPLARAYSFWGQSSTQAQQHSRSHSKISKHMTPPAPCPGPEPNWGKGPPETRSSLELDTELSWISGDLLPPGGQEEPPSPRDLKKCYSVEAQSCQRRPTSWLDEQRRHSIAVSCLDSGSQPHLGTDPSNLGGQPLGGPGSRPKKKLSPPSITIDPPESQGPRTPPSPGICLRRRAPSSDSKDPLASGPPDSMAASPSPKKDVLSLSGLSSDPADLDPXVLPHFPTHLSPLGAKS

SEQ ID NO: 838 - protein, 2188 aa, Homo Sapiens
  misc_feature (2172)..(2172): Xaa can be any naturally occurring amino acid
MDEEEDGAGAEESGQPRSFMRLNDLSGAGGRPGPGSAEKDPGSADSEAEGLPYPALAPVVFFYLSQDSRPRSWCLRTVCNPWFERISMLVILLNCVTLGMFRPCEDIACDSQRCRILQAFDDFIFAFFAVEMVVKMVALGIFGKKCYLGDTWNRLDFFIVIAGMLEYSLDLQNVSFSAVRTVRVLRPLRAINRVPSMRILVTLLLDTLPMLGNVLLLCFFVFFIFGIVGVQLWAGLLRNRCFLPENFSLPLSVDLERYYQTENEDESPFICSQPRENGMRSCRSVPTLRGDGGGGPPCGLDYEAYNSSSNTTCVNWNQYYTNCSAGEHNPFKGAINFDNIGYAWIAIFQVITLEGWVDIMYFVMDAHSFYNFIYFILLIIVGSFFMINLCLVVIATQFSETKQRESQLMREQRVRFLSNASTLASFSEPGSCYEELLKYLVYILRKAARRLAQVSRAAGVRVGLLSSPAPLGGQETQPSSSCSRSHRRLSVHHLVHHHHHHHHHYHLGNGTLRAPRASPEIQDRDANGSRRLMLPPPSTPALSGAPPGGAESVHSFYHADCHLEPVRCQAPPPRSPSEASGRTVGSGKVYPTVHTSPPPETLKEKALVEVAASSGPPTLTSLNIPPGPYSSMHKLLETQSTGACQSSCKISSPCLKADSGACGPDSCPYCARAGAGEVELADREMPDSDSEAVYEFTQDAQHSDLRDPHSRRQRSLGPDAEPSSVLAFWRLICDTFRKIVDSKYFGRGIMIAILVNTLSMGIEYHEQPEELTNALEISNIVFTSLFALEMLLKLLVYGPFGYIKNPYNIFDGVIVVISVWEIVGQQGGGLSVLRTFRLMRVLKLVRFLPALQRQLVVLMKTMDNVATFCMLLMLFIFIFSILGMHLFGCKFASERDGDTLPDRKNFDSLLWAIVTVFQILTQEDWNKVLYNGMASTSSWAALYFIALMTFGNYVLFNLLVAILVEGFQAEGDANKSESEPDFFSPSLDGDGDRKKCLALVSLGEHPELRKSLLPPLIIHTAATPMSLPKSTSTGLGEALGPASRRTSSSGSAEPGAAHEMKSPPSARSSPHSPWSAASSWTSRRSSRNSLGRAPSLKRRSPSGERRSLLSGEGQESQDEEESSEEERASPAGSDHRHRGSLEREAKSSFDLPDTLQVPGLHRTASGRGSASEHQDCNGKSASGRLARALRPDDPPLDGDDADDEGNLSKGERVRAWIRARLPACCLERDSWSAYIFPPQSRFRLLCHRIITHKMFDHVVLVIIFLNCITIAMERPKIDPHSAERIFLTLSNYIFTAVFLAEMTVKVVALGWCFGEQAYLRSSWNVLDGLLVLISVIDILVSMVSDSGTKILGMLRVLRLLRTLRPLRVISRAQGLKLVVETLMSSLKPIGNIVVICCAFFIIFGILGVQLFKGKFFVCQGEDTRNITNKSDCAEASYRWVRHKYNFDNLGQALMSLFVLASKDGWVDIMYDGLDAVGVDQQPIMNHNPWMLLYFISFLLIVAFFVLNMFVGVVVENFHKCRQHQEEEEARRREEKRLRRLEKKRRSKEKQMAEAQCKPYYSDYSRFRLLVHHLCTSHYLDLFITGVIGLNVVTMAMEHYQQPQILDEALKICNYIFTVIFVLESVFKLVAFGFRRFFQDRWNQLDLAIVLLSIMGITLEEIEVNASLPINPTIIRIMRVLRIARVLKLLKMAVGMRALLDTVMQALPQVGNLGLLFMLLFFIFAALGVELFGDLECDETHPCEGLGRHATFRNFGMAFLTLFRVSTGDNWNGIMKDTLRDCDQESTCYNTVISPIYFVSFVLTAQFVLVNVVIAVLMKHLEESNKEAKEEAELEAELELEMKTLSPQPHSPLGSPFLWPGVEGPDSPDSPKPGALHPAAHARSASHFSLEHPTMQPHPTELPGPDLLTVRKSGVSRTHSLPNDSYMCRHGSTAEGPLGHRGWGLPKAQSGSVLSVHSQPADTSYILQLPKDAPHLLQPHSAPTWGTIPKLPPPGRSPLAQRPLRRQAAIRTDSLDVQGLGSREDLLAEEEPPSPRDLKKCYSVEAQSCQRRPTSWLDEQRRHSIAVSCLDSGSQPHLGTDPSNLGGQPLGGPGSRPKKKLSPPSITIDPPESQGPRTPPSPGICLRRRAPSSDSKDPLASGPPDSMAASPSPKKDVLSLSGLSSDPADLDPXVLPHFPTHLSPLGAKS

SEQ ID NO: 839 - protein, 2290 aa, Homo Sapiens
  misc_feature (2274)..(2274): Xaa can be any naturally occurring amino acid
MDEEEDGAGAEESGQPRSFMRLNDLSGAGGRPGPGSAEKDPGSADSEAEGLPYPALAPVVFFYLSQDSRPRSWCLRTVCNPWFERISMLVILLNCVTLGMFRPCEDIACDSQRCRILQAFDDFIFAFFAVEMVVKMVALGIFGKKCYLGDTWNRLDFFIVIAGMLEYSLDLQNVSFSAVRTVRVLRPLRAINRVPSMRILVTLLLDTLPMLGNVLLLCFFVFFIFGIVGVQLWAGLLRNRCFLPENFSLPLSVDLERYYQTENEDESPFICSQPRENGMRSCRSVPTLRGDGGGGPPCGLDYEAYNSSSNTTCVNWNQYYTNCSAGEHNPFKGAINFDNIGYAWIAIFQVITLEGWVDIMYFVMDAHSFYNFIYFILLIIVGSFFMINLCLVVIATQFSETKQRESQLMREQRVRFLSNASTLASFSEPGSCYEELLKYLVYILRKAARRLAQVSRAAGVRVGLLSSPAPLGGQETQPSSSCSRSHRRLSVHHLVHHHHHHHHHYHLGNGTLRAPRASPEIQDRDANGSRRLMLPPPSTPALSGAPPGGAESVHSFYHADCHLEPVRCQAPPPRSPSEASGRTVGSGKVYPTVHTSPPPETLKEKALVEVAASSGPPTLTSLNIPPGPYSSMHKLLETQSTGACQSSCKISSPCLKADSGACGPDSCPYCARAGAGEVELADREMPDSDSEAVYEFTQDAQHSDLRDPHSRRQRSLGPDAEPSSVLAFWRLICDTFRKIVDSKYFGRGIMIAILVNTLSMGIEYHEQPEELTNALEISNIVFTSLFALEMLLKLLVYGPFGYIKNPYNIFDGVIVVISVWEIVGQQGGGLSVLRTFRLMRVLKLVRFLPALQRQLVVLMKTMDNVATFCMLLMLFIFIFSILGMHLFGCKFASERDGDTLPDRKNFDSLLWAIVTVFQILTQEDWNKVLYNGMASTSSWAALYFIALMTFGNYVLFNLLVAILVEGFQAEEISKREDASGQLSCIQLPVDSQGGDANKSESEPDFFSPSLDGDGDRKKCLALVSLGEHPELRKSLLPPLIIHTAATPMSLPKSTSTGLGEALGPASRRTSSSGSAEPGAAHEMKSPPSARSSPHSPWSAASSWTSRRSSRNSLGRAPSLKRRSPSGERRSLLSGEGQESQDEEESSEEERASPAGSDHRHRGSLEREAKSSFDLPDTLQVPGLHRTASGRGSASEHQDCNGKSASGRLARALRPDDPPLDGDDADDEGNLSKGERVRAWIRARLPACCLERDSWSAYIFPPQSRFRLLCHRIITHKMFDHVVLVIIFLNCITIAMERPKIDPHSAERIFLTLSNYIFTAVFLAEMTVKVVALGWCFGEQAYLRSSWNVLDGLLVLISVIDILVSMVSDSGTKILGMLRVLRLLRTLRPLRVISRAQGLKLVVETLMSSLKPIGNIVVICCAFFIIFGILGVQLFKGKFFVCQGEDTRNITNKSDCAEASYRWVRHKYNFDNLGQALMSLFVLASKDGWVDIMYDGLDAVGVDQQPIMNHNPWMLLYFISFLLIVAFFVLNMFVGVVVENFHKCRQHQEEEEARRREEKRLRRLEKKRRSKEKQMAEAQCKPYYSDYSRFRLLVHHLCTSHYLDLFITGVIGLNVVTMAMEHYQQPQILDEALKICNYIFTVIFVLESVFKLVAFGFRRFFQDRWNQLDLAIVLLSIMGITLEEIEVNASLPINPTIIRIMRVLRIARVLKLLKMAVGMRALLDTVMQALPQVGNLGLLFMLLFFIFAALGVELFGDLECDETHPCEGLGRHATFRNFGMAFLTLFRVSTGDNWNGIMKDTLRDCDQESTCYNTVISPIYFVSFVLTAQFVLVNVVIAVLMKHLEESNKEAKEEAELEAELELEMKTLSPQPHSPLGSPFLWPGVEGPDSPDSPKPGALHPAAHARSASHFSLEHPTMQPHPTELPGPDLLTVRKSGVSRTHSLPNDSYMCRHGSTAEGPLGHRGWGLPKAQSGSVLSVHSQPADTSYILQLPKDAPHLLQPHSAPTWGTIPKLPPPGRSPLAQRPLRRQAAIRTDSLDVQGLGSREDLLAEVSGPSPPLARAYSFWGQSSTQAQQHSRSHSKISKHMTPPAPCPGPEPNWGKGPPETRSSLELDTELSWISGDLLPPGGQEEPPSPRDLKKCYSVEAQSCQRRPTSWLDEQRRHSIAVSCLDSGSQPHLGTDPSNLGGQPLGGPGSRPKKKLSPPSITIDPPESQGPRTPPSPGICLRRRAPSSDSKDPLASGPPDSMAASPSPKKDVLSLSGLSSDPADLDPXVLPHFPTHLSPLGAKS

SEQ ID NO: 840 - protein, 2315 aa, Homo Sapiens
  misc_feature (2299)..(2299): Xaa can be any naturally occurring amino acid
MDEEEDGAGAEESGQPRSFMRLNDLSGAGGRPGPGSAEKDPGSADSEAEGLPYPALAPVVFFYLSQDSRPRSWCLRTVCNPWFERISMLVILLNCVTLGMFRPCEDIACDSQRCRILQAFDDFIFAFFAVEMVVKMVALGIFGKKCYLGDTWNRLDFFIVIAGMLEYSLDLQNVSFSAVRTVRVLRPLRAINRVPSMRILVTLLLDTLPMLGNVLLLCFFVFFIFGIVGVQLWAGLLRNRCFLPENFSLPLSVDLERYYQTENEDESPFICSQPRENGMRSCRSVPTLRGDGGGGPPCGLDYEAYNSSSNTTCVNWNQYYTNCSAGEHNPFKGAINFDNIGYAWIAIFQVITLEGWVDIMYFVMDAHSFYNFIYFILLIIVGSFFMINLCLVVIATQFSETKQRESQLMREQRVRFLSNASTLASFSEPGSCYEELLKYLVYILRKAARRLAQVSRAAGVRVGLLSSPAPLGGQETQPSSSCSRSHRRLSVHHLVHHHHHHHHHYHLGNGTLRAPRASPEIQDRDANGSRRLMLPPPSTPALSGAPPGGAESVHSFYHADCHLEPVRCQAPPPRSPSEASGRTVGSGKVYPTVHTSPPPETLKEKALVEVAASSGPPTLTSLNIPPGPYSSMHKLLETQSTGACQSSCKISSPCLKADSGACGPDSCPYCARAGAGEVELADREMPDSDSEAVYEFTQDAQHSDLRDPHSRRQRSLGPDAEPSSVLAFWRLICDTFRKIVDSKYFGRGIMIAILVNTLSMGIEYHEQPEELTNALEISNIVFTSLFALEMLLKLLVYGPFGYIKNPYNIFDGVIVVISVWEIVGQQGGGLSVLRTFRLMRVLKLVRFLPALQRQLVVLMKTMDNVATFCMLLMLFIFIFSILGMHLFGCKFASERDGDTLPDRKNFDSLLWAIVTVFQILTQEDWNKVLYNGMASTSSWAALYFIALMTFGNYVLFNLLVAILVEGFQAEGDANKSESEPDFFSPSLDGDGDRKKCLALVSLGEHPELRKSLLPPLIIHTAATPMSLPKSTSTGLGEALGPASRRTSSSGSAEPGAAHEMKSPPSARSSPHSPWSAASSWTSRRSSRNSLGRAPSLKRRSPSGERRSLLSGEGQESQDEEESSEEERASPAGSDHRHRGSLEREAKSSFDLPDTLQVPGLHRTASGRGSASEHQDCNGKSASGRLARALRPDDPPLDGDDADDEGNLSKGERVRAWIRARLPACCLERDSWSAYIFPPQSRFRLLCHRIITHKMFDHVVLVIIFLNCITIAMERPKIDPHSAERIFLTLSNYIFTAVFLAEMTVKVVALGWCFGEQAYLRSSWNVLDGLLVLISVIDILVSMVSDSGTKILGMLRVLRLLRTLRPLRVISRAQGLKLVVETLMSSLKPIGNIVVICCAFFIIFGILGVQLFKGKFFVCQGEDTRNITNKSDCAEASYRWVRHKYNFDNLGQALMSLFVLASKDGWVDIMYDGLDAVGVDQQPIMNHNPWMLLYFISFLLIVAFFVLNMFVGVVVENFHKCRQHQEEEEARRREEKRLRRLEKKRRSKEKQMAEAQCKPYYSDYSRFRLLVHHLCTSHYLDLFITGVIGLNVVTMAMEHYQQPQILDEALKICNYIFTVIFVLESVFKLVAFGFRRFFQDRWNQLDLAIVLLSIMGITLEEIEVNASLPINPTIIRIMRVLRIARVLKLLKMAVGMRALLDTVMQALPQVGNLGLLFMLLFFIFAALGVELFGDLECDETHPCEGLGRHATFRNFGMAFLTLFRVSTGDNWNGIMKDTLRDCDQESTCYNTVISPIYFVSFVLTAQFVLVNVVIAVLMKHLEESNKEAKEEAELEAELELEMKTLSPQPHSPLGSPFLWPGVEGPDSPDSPKPGALHPAAHARSASHFSLEHPTDRQLFDTISLLIQGSLEWELKLMDELAGPGGQPSAFPSAPSLGGSDPQMQPHPTELPGPDLLTVRKSGVSRTHSLPNDSYMCRHGSTAEGPLGHRGWGLPKAQSGSVLSVHSQPADTSYILQLPKDAPHLLQPHSAPTWGTIPKLPPPGRSPLAQRPLRRQAAIRTDSLDVQGLGSREDLLAEVSGPSPPLARAYSFWGQSSTQAQQHSRSHSKISKHMTPPAPCPGPEPNWGKGPPETRSSLELDTELSWISGDLLPPGGQEEPPSPRDLKKCYSVEAQSCQRRPTSWLDEQRRHSIAVSCLDSGSQPHLGTDPSNLGGQPLGGPGSRPKKKLSPPSITIDPPESQGPRTPPSPGICLRRRAPSSDSKDPLASGPPDSMAASPSPKKDVLSLSGLSSDPADLDPXVLPHFPTHLSPLGAKS

SEQ ID NO: 841 - protein, 2338 aa, Homo Sapiens
  misc_feature (2322)..(2322): Xaa can be any naturally occurring amino acid
MDEEEDGAGAEESGQPRSFMRLNDLSGAGGRPGPGSAEKDPGSADSEAEGLPYPALAPVVFFYLSQDSRPRSWCLRTVCNPWFERISMLVILLNCVTLGMFRPCEDIACDSQRCRILQAFDDFIFAFFAVEMVVKMVALGIFGKKCYLGDTWNRLDFFIVIAGMLEYSLDLQNVSFSAVRTVRVLRPLRAINRVPSMRILVTLLLDTLPMLGNVLLLCFFVFFIFGIVGVQLWAGLLRNRCFLPENFSLPLSVDLERYYQTENEDESPFICSQPRENGMRSCRSVPTLRGDGGGGPPCGLDYEAYNSSSNTTCVNWNQYYTNCSAGEHNPFKGAINFDNIGYAWIAIFQVITLEGWVDIMYFVMDAHSFYNFIYFILLIIVGSFFMINLCLVVIATQFSETKQRESQLMREQRVRFLSNASTLASFSEPGSCYEELLKYLVYILRKAARRLAQVSRAAGVRVGLLSSPAPLGGQETQPSSSCSRSHRRLSVHHLVHHHHHHHHHYHLGNGTLRAPRASPEIQDRDANGSRRLMLPPPSTPALSGAPPGGAESVHSFYHADCHLEPVRCQAPPPRSPSEASGRTVGSGKVYPTVHTSPPPETLKEKALVEVAASSGPPTLTSLNIPPGPYSSMHKLLETQSTGACQSSCKISSPCLKADSGACGPDSCPYCARAGAGEVELADREMPDSDSEAVYEFTQDAQHSDLRDPHSRRQRSLGPDAEPSSVLAFWRLICDTFRKIVDSKYFGRGIMIAILVNTLSMGIEYHEQPEELTNALEISNIVFTSLFALEMLLKLLVYGPFGYIKNPYNIFDGVIVVISVWEIVGQQGGGLSVLRTFRLMRVLKLVRFLPALQRQLVVLMKTMDNVATFCMLLMLFIFIFSILGMHLFGCKFASERDGDTLPDRKNFDSLLWAIVTVFQILTQEDWNKVLYNGMASTSSWAALYFIALMTFGNYVLFNLLVAILVEGFQAEEISKREDASGQLSCIQLPVDSQGGDANKSESEPDFFSPSLDGDGDRKKCLALVSLGEHPELRKSLLPPLIIHTAATPMSLPKSTSTGLGEALGPASRRTSSSGSAEPGAAHEMKSPPSARSSPHSPWSAASSWTSRRSSRNSLGRAPSLKRRSPSGERRSLLSGEGQESQDEEESSEEERASPAGSDHRHRGSLEREAKSSFDLPDTLQVPGLHRTASGRGSASEHQDCNGKSASGRLARALRPDDPPLDGDDADDEGNLSKGERVRAWIRARLPACCLERDSWSAYIFPPQSRFRLLCHRIITHKMFDHVVLVIIFLNCITIAMERPKIDPHSAERIFLTLSNYIFTAVFLAEMTVKVVALGWCFGEQAYLRSSWNVLDGLLVLISVIDILVSMVSDSGTKILGMLRVLRLLRTLRPLRVISRAQGLKLVVETLMSSLKPIGNIVVICCAFFIIFGILGVQLFKGKFFVCQGEDTRNITNKSDCAEASYRWVRHKYNFDNLGQALMSLFVLASKDGWVDIMYDGLDAVGVDQQPIMNHNPWMLLYFISFLLIVAFFVLNMFVGVVVENFHKCRQHQEEEEARRREEKRLRRLEKKRRSKEKQMAEAQCKPYYSDYSRFRLLVHHLCTSHYLDLFITGVIGLNVVTMAMEHYQQPQILDEALKICNYIFTVIFVLESVFKLVAFGFRRFFQDRWNQLDLAIVLLSIMGITLEEIEVNASLPINPTIIRIMRVLRIARVLKLLKMAVGMRALLDTVMQALPQVGNLGLLFMLLFFIFAALGVELFGDLECDETHPCEGLGRHATFRNFGMAFLTLFRVSTGDNWNGIMKDTLRDCDQESTCYNTVISPIYFVSFVLTAQFVLVNVVIAVLMKHLEESNKEAKEEAELEAELELEMKTLSPQPHSPLGSPFLWPGVEGPDSPDSPKPGALHPAAHARSASHFSLEHPTDRQLFDTISLLIQGSLEWELKLMDELAGPGGQPSAFPSAPSLGGSDPQMQPHPTELPGPDLLTVRKSGVSRTHSLPNDSYMCRHGSTAEGPLGHRGWGLPKAQSGSVLSVHSQPADTSYILQLPKDAPHLLQPHSAPTWGTIPKLPPPGRSPLAQRPLRRQAAIRTDSLDVQGLGSREDLLAEVSGPSPPLARAYSFWGQSSTQAQQHSRSHSKISKHMTPPAPCPGPEPNWGKGPPETRSSLELDTELSWISGDLLPPGGQEEPPSPRDLKKCYSVEAQSCQRRPTSWLDEQRRHSIAVSCLDSGSQPHLGTDPSNLGGQPLGGPGSRPKKKLSPPSITIDPPESQGPRTPPSPGICLRRRAPSSDSKDPLASGPPDSMAASPSPKKDVLSLSGLSSDPADLDPXVLPHFPTHLSPLGAKS

SEQ ID NO: 842 - protein, 2278 aa, Homo Sapiens
  misc_feature (2262)..(2262): Xaa can be any naturally occurring amino acid
MDEEEDGAGAEESGQPRSFMRLNDLSGAGGRPGPGSAEKDPGSADSEAEGLPYPALAPVVFFYLSQDSRPRSWCLRTVCNPWFERISMLVILLNCVTLGMFRPCEDIACDSQRCRILQAFDDFIFAFFAVEMVVKMVALGIFGKKCYLGDTWNRLDFFIVIAGMLEYSLDLQNVSFSAVRTVRVLRPLRAINRVPSMRILVTLLLDTLPMLGNVLLLCFFVFFIFGIVGVQLWAGLLRNRCFLPENFSLPLSVDLERYYQTENEDESPFICSQPRENGMRSCRSVPTLRGDGGGGPPCGLDYEAYNSSSNTTCVNWNQYYTNCSAGEHNPFKGAINFDNIGYAWIAIFQVITLEGWVDIMYFVMDAHSFYNFIYFILLIIVGSFFMINLCLVVIATQFSETKQRESQLMREQRVRFLSNASTLASFSEPGSCYEELLKYLVYILRKAARRLAQVSRAAGVRVGLLSSPAPLGGQETQPSSSCSRSHRRLSVHHLVHHHHHHHHHYHLGNGTLRAPRASPEIQDRDANGSRRLMLPPPSTPALSGAPPGGAESVHSFYHADCHLEPVRCQAPPPRSPSEASGRTVGSGKVYPTVHTSPPPETLKEKALVEVAASSGPPTLTSLNIPPGPYSSMHKLLETQSTGACQSSCKISSPCLKADSGACGPDSCPYCARAGAGEVELADREMPDSDSEAVYEFTQDAQHSDLRDPHSRRQRSLGPDAEPSSVLAFWRLICDTFRKIVDSKYFGRGIMIAILVNTLSMGIEYHEQPEELTNALEISNIVFTSLFALEMLLKLLVYGPFGYIKNPYNIFDGVIVVISVWEIVGQQGGGLSVLRTFRLMRVLKLVRFLPALQRQLVVLMKTMDNVATFCMLLMLFIFIFSILGMHLFGCKFASERDGDTLPDRKNFDSLLWAIVTVFQILTQEDWNKVLYNGMASTSSWAALYFIALMTFGNYVLFNLLVAILVEGFQAEGDANKSESEPDFFSPSLDGDGDRKKCLALVSLGEHPELRKSLLPPLIIHTAATPMSLPKSTSTGLGEALGPASRRTSSSGSAEPGAAHEMKSPPSARSSPHSPWSAASSWTSRRSSRNSLGRAPSLKRRSPSGERRSLLSGEGQESQDEEESSEEERASPAGSDHRHRGSLEREAKSSFDLPDTLQVPGLHRTASGRGSASEHQDCNGKSASGRLARALRPDDPPLDGDDADDEGNLSKGERVRAWIRARLPACCLERDSWSAYIFPPQSRFRLLCHRIITHKMFDHVVLVIIFLNCITIAMERPKIDPHSAERIFLTLSNYIFTAVFLAEMTVKVVALGWCFGEQAYLRSSWNVLDGLLVLISVIDILVSMVSDSGTKILGMLRVLRLLRTLRPLRVISRAQGLKLVVETLMSSLKPIGNIVVICCAFFIIFGILGVQLFKGKFFVCQGEDTRNITNKSDCAEASYRWVRHKYNFDNLGQALMSLFVLASKDGWVDIMYDGLDAVGVDQQPIMNHNPWMLLYFISFLLIVAFFVLNMFVGVVVENFHKCRQHQEEEEARRREEKRLRRLEKKRRNLMLDDVIASGSSASAASEAQCKPYYSDYSRFRLLVHHLCTSHYLDLFITGVIGLNVVTMAMEHYQQPQILDEALKICNYIFTVIFVLESVFKLVAFGFRRFFQDRWNQLDLAIVLLSIMGITLEEIEVNASLPINPTIIRIMRVLRIARVLKLLKMAVGMRALLDTVMQALPQVGNLGLLFMLLFFIFAALGVELFGDLECDETHPCEGLGRHATFRNFGMAFLTLFRVSTGDNWNGIMKDTLRDCDQESTCYNTVISPIYFVSFVLTAQFVLVNVVIAVLMKHLEESNKEAKEEAELEAELELEMKTLSPQPHSPLGSPFLWPGVEGPDSPDSPKPGALHPAAHARSASHFSLEHPTMQPHPTELPGPDLLTVRKSGVSRTHSLPNDSYMCRHGSTAEGPLGHRGWGLPKAQSGSVLSVHSQPADTSYILQLPKDAPHLLQPHSAPTWGTIPKLPPPGRSPLAQRPLRRQAAIRTDSLDVQGLGSREDLLAEVSGPSPPLARAYSFWGQSSTQAQQHSRSHSKISKHMTPPAPCPGPEPNWGKGPPETRSSLELDTELSWISGDLLPPGGQEEPPSPRDLKKCYSVEAQSCQRRPTSWLDEQRRHSIAVSCLDSGSQPHLGTDPSNLGGQPLGGPGSRPKKKLSPPSITIDPPESQGPRTPPSPGICLRRRAPSSDSKDPLASGPPDSMAASPSPKKDVLSLSGLSSDPADLDPXVLPHFPTHLSPLGAKS

SEQ ID NO: 843 - protein, 2323 aa, Homo Sapiens
  misc_feature (2307)..(2307): Xaa can be any naturally occurring amino acid
MDEEEDGAGAEESGQPRSFMRLNDLSGAGGRPGPGSAEKDPGSADSEAEGLPYPALAPVVFFYLSQDSRPRSWCLRTVCNPWFERISMLVILLNCVTLGMFRPCEDIACDSQRCRILQAFDDFIFAFFAVEMVVKMVALGIFGKKCYLGDTWNRLDFFIVIAGMLEYSLDLQNVSFSAVRTVRVLRPLRAINRVPSMRILVTLLLDTLPMLGNVLLLCFFVFFIFGIVGVQLWAGLLRNRCFLPENFSLPLSVDLERYYQTENEDESPFICSQPRENGMRSCRSVPTLRGDGGGGPPCGLDYEAYNSSSNTTCVNWNQYYTNCSAGEHNPFKGAINFDNIGYAWIAIFQVITLEGWVDIMYFVMDAHSFYNFIYFILLIIVGSFFMINLCLVVIATQFSETKQRESQLMREQRVRFLSNASTLASFSEPGSCYEELLKYLVYILRKAARRLAQVSRAAGVRVGLLSSPAPLGGQETQPSSSCSRSHRRLSVHHLVHHHHHHHHHYHLGNGTLRAPRASPEIQDRDANGSRRLMLPPPSTPALSGAPPGGAESVHSFYHADCHLEPVRCQAPPPRSPSEASGRTVGSGKVYPTVHTSPPPETLKEKALVEVAASSGPPTLTSLNIPPGPYSSMHKLLETQSTGACQSSCKISSPCLKADSGACGPDSCPYCARAGAGEVELADREMPDSDSEAVYEFTQDAQHSDLRDPHSRRQRSLGPDAEPSSVLAFWRLICDTFRKIVDSKYFGRGIMIAILVNTLSMGIEYHEQPEELTNALEISNIVFTSLFALEMLLKLLVYGPFGYIKNPYNIFDGVIVVISVWEIVGQQGGGLSVLRTFRLMRVLKLVRFLPALQRQLVVLMKTMDNVATFCMLLMLFIFIFSILGMHLFGCKFASERDGDTLPDRKNFDSLLWAIVTVFQILTQEDWNKVLYNGMASTSSWAALYFIALMTFGNYVLFNLLVAILVEGFQAEGDANKSESEPDFFSPSLDGDGDRKKCLALVSLGEHPELRKSLLPPLIIHTAATPMSLPKSTSTGLGEALGPASRRTSSSGSAEPGAAHEMKSPPSARSSPHSPWSAASSWTSRRSSRNSLGRAPSLKRRSPSGERRSLLSGEGQESQDEEESSEEERASPAGSDHRHRGSLEREAKSSFDLPDTLQVPGLHRTASGRGSASEHQDCNGKSASGRLARALRPDDPPLDGDDADDEGNLSKGERVRAWIRARLPACCLERDSWSAYIFPPQSRFRLLCHRIITHKMFDHVVLVIIFLNCITIAMERPKIDPHSAERIFLTLSNYIFTAVFLAEMTVKVVALGWCFGEQAYLRSSWNVLDGLLVLISVIDILVSMVSDSGTKILGMLRVLRLLRTLRPLRVISRAQGLKLVVETLMSSLKPIGNIVVICCAFFIIFGILGVQLFKGKFFVCQGEDTRNITNKSDCAEASYRWVRHKYNFDNLGQALMSLFVLASKDGWVDIMYDGLDAVGVDQQPIMNHNPWMLLYFISFLLIVAFFVLNMFVGVVVENFHKCRQHQEEEEARRREEKRLRRLEKKRRNLMLDDVIASGSSASAASEAQCKPYYSDYSRFRLLVHHLCTSHYLDLFITGVIGLNVVTMAMEHYQQPQILDEALKICNYIFTVIFVLESVFKLVAFGFRRFFQDRWNQLDLAIVLLSIMGITLEEIEVNASLPINPTIIRIMRVLRIARVLKLLKMAVGMRALLDTVMQALPQVGNLGLLFMLLFFIFAALGVELFGDLECDETHPCEGLGRHATFRNFGMAFLTLFRVSTGDNWNGIMKDTLRDCDQESTCYNTVISPIYFVSFVLTAQFVLVNVVIAVLMKHLEESNKEAKEEAELEAELELEMKTLSPQPHSPLGSPFLWPGVEGPDSPDSPKPGALHPAAHARSASHFSLEHPTIPLAEMEALSLTSEIVSEPSCSLALTDDSLPDDMHTLLLSALESNMQPHPTELPGPDLLTVRKSGVSRTHSLPNDSYMCRHGSTAEGPLGHRGWGLPKAQSGSVLSVHSQPADTSYILQLPKDAPHLLQPHSAPTWGTIPKLPPPGRSPLAQRPLRRQAAIRTDSLDVQGLGSREDLLAEVSGPSPPLARAYSFWGQSSTQAQQHSRSHSKISKHMTPPAPCPGPEPNWGKGPPETRSSLELDTELSWISGDLLPPGGQEEPPSPRDLKKCYSVEAQSCQRRPTSWLDEQRRHSIAVSCLDSGSQPHLGTDPSNLGGQPLGGPGSRPKKKLSPPSITIDPPESQGPRTPPSPGICLRRRAPSSDSKDPLASGPPDSMAASPSPKKDVLSLSGLSSDPADLDPXVLPHFPTHLSPLGAKS

SEQ ID NO: 844 - protein, 2301 aa, Homo Sapiens
  misc_feature (2285)..(2285): Xaa can be any naturally occurring amino acid
MDEEEDGAGAEESGQPRSFMRLNDLSGAGGRPGPGSAEKDPGSADSEAEGLPYPALAPVVFFYLSQDSRPRSWCLRTVCNPWFERISMLVILLNCVTLGMFRPCEDIACDSQRCRILQAFDDFIFAFFAVEMVVKMVALGIFGKKCYLGDTWNRLDFFIVIAGMLEYSLDLQNVSFSAVRTVRVLRPLRAINRVPSMRILVTLLLDTLPMLGNVLLLCFFVFFIFGIVGVQLWAGLLRNRCFLPENFSLPLSVDLERYYQTENEDESPFICSQPRENGMRSCRSVPTLRGDGGGGPPCGLDYEAYNSSSNTTCVNWNQYYTNCSAGEHNPFKGAINFDNIGYAWIAIFQVITLEGWVDIMYFVMDAHSFYNFIYFILLIIVGSFFMINLCLVVIATQFSETKQRESQLMREQRVRFLSNASTLASFSEPGSCYEELLKYLVYILRKAARRLAQVSRAAGVRVGLLSSPAPLGGQETQPSSSCSRSHRRLSVHHLVHHHHHHHHHYHLGNGTLRAPRASPEIQDRDANGSRRLMLPPPSTPALSGAPPGGAESVHSFYHADCHLEPVRCQAPPPRSPSEASGRTVGSGKVYPTVHTSPPPETLKEKALVEVAASSGPPTLTSLNIPPGPYSSMHKLLETQSTGACQSSCKISSPCLKADSGACGPDSCPYCARAGAGEVELADREMPDSDSEAVYEFTQDAQHSDLRDPHSRRQRSLGPDAEPSSVLAFWRLICDTFRKIVDSKYFGRGIMIAILVNTLSMGIEYHEQPEELTNALEISNIVFTSLFALEMLLKLLVYGPFGYIKNPYNIFDGVIVVISVWEIVGQQGGGLSVLRTFRLMRVLKLVRFLPALQRQLVVLMKTMDNVATFCMLLMLFIFIFSILGMHLFGCKFASERDGDTLPDRKNFDSLLWAIVTVFQILTQEDWNKVLYNGMASTSSWAALYFIALMTFGNYVLFNLLVAILVEGFQAEEISKREDASGQLSCIQLPVDSQGGDANKSESEPDFFSPSLDGDGDRKKCLALVSLGEHPELRKSLLPPLIIHTAATPMSLPKSTSTGLGEALGPASRRTSSSGSAEPGAAHEMKSPPSARSSPHSPWSAASSWTSRRSSRNSLGRAPSLKRRSPSGERRSLLSGEGQESQDEEESSEEERASPAGSDHRHRGSLEREAKSSFDLPDTLQVPGLHRTASGRGSASEHQDCNGKSASGRLARALRPDDPPLDGDDADDEGNLSKGERVRAWIRARLPACCLERDSWSAYIFPPQSRFRLLCHRIITHKMFDHVVLVIIFLNCITIAMERPKIDPHSAERIFLTLSNYIFTAVFLAEMTVKVVALGWCFGEQAYLRSSWNVLDGLLVLISVIDILVSMVSDSGTKILGMLRVLRLLRTLRPLRVISRAQGLKLVVETLMSSLKPIGNIVVICCAFFIIFGILGVQLFKGKFFVCQGEDTRNITNKSDCAEASYRWVRHKYNFDNLGQALMSLFVLASKDGWVDIMYDGLDAVGVDQQPIMNHNPWMLLYFISFLLIVAFFVLNMFVGVVVENFHKCRQHQEEEEARRREEKRLRRLEKKRRNLMLDDVIASGSSASAASEAQCKPYYSDYSRFRLLVHHLCTSHYLDLFITGVIGLNVVTMAMEHYQQPQILDEALKICNYIFTVIFVLESVFKLVAFGFRRFFQDRWNQLDLAIVLLSIMGITLEEIEVNASLPINPTIIRIMRVLRIARVLKLLKMAVGMRALLDTVMQALPQVGNLGLLFMLLFFIFAALGVELFGDLECDETHPCEGLGRHATFRNFGMAFLTLFRVSTGDNWNGIMKDTLRDCDQESTCYNTVISPIYFVSFVLTAQFVLVNVVIAVLMKHLEESNKEAKEEAELEAELELEMKTLSPQPHSPLGSPFLWPGVEGPDSPDSPKPGALHPAAHARSASHFSLEHPTMQPHPTELPGPDLLTVRKSGVSRTHSLPNDSYMCRHGSTAEGPLGHRGWGLPKAQSGSVLSVHSQPADTSYILQLPKDAPHLLQPHSAPTWGTIPKLPPPGRSPLAQRPLRRQAAIRTDSLDVQGLGSREDLLAEVSGPSPPLARAYSFWGQSSTQAQQHSRSHSKISKHMTPPAPCPGPEPNWGKGPPETRSSLELDTELSWISGDLLPPGGQEEPPSPRDLKKCYSVEAQSCQRRPTSWLDEQRRHSIAVSCLDSGSQPHLGTDPSNLGGQPLGGPGSRPKKKLSPPSITIDPPESQGPRTPPSPGICLRRRAPSSDSKDPLASGPPDSMAASPSPKKDVLSLSGLSSDPADLDPXVLPHFPTHLSPLGAKS

SEQ ID NO: 845 - protein, 2349 aa, Homo Sapiens
  misc_feature (2333)..(2333): Xaa can be any naturally occurring amino acid
MDEEEDGAGAEESGQPRSFMRLNDLSGAGGRPGPGSAEKDPGSADSEAEGLPYPALAPVVFFYLSQDSRPRSWCLRTVCNPWFERISMLVILLNCVTLGMFRPCEDIACDSQRCRILQAFDDFIFAFFAVEMVVKMVALGIFGKKCYLGDTWNRLDFFIVIAGMLEYSLDLQNVSFSAVRTVRVLRPLRAINRVPSMRILVTLLLDTLPMLGNVLLLCFFVFFIFGIVGVQLWAGLLRNRCFLPENFSLPLSVDLERYYQTENEDESPFICSQPRENGMRSCRSVPTLRGDGGGGPPCGLDYEAYNSSSNTTCVNWNQYYTNCSAGEHNPFKGAINFDNIGYAWIAIFQVITLEGWVDIMYFVMDAHSFYNFIYFILLIIVGSFFMINLCLVVIATQFSETKQRESQLMREQRVRFLSNASTLASFSEPGSCYEELLKYLVYILRKAARRLAQVSRAAGVRVGLLSSPAPLGGQETQPSSSCSRSHRRLSVHHLVHHHHHHHHHYHLGNGTLRAPRASPEIQDRDANGSRRLMLPPPSTPALSGAPPGGAESVHSFYHADCHLEPVRCQAPPPRSPSEASGRTVGSGKVYPTVHTSPPPETLKEKALVEVAASSGPPTLTSLNIPPGPYSSMHKLLETQSTGACQSSCKISSPCLKADSGACGPDSCPYCARAGAGEVELADREMPDSDSEAVYEFTQDAQHSDLRDPHSRRQRSLGPDAEPSSVLAFWRLICDTFRKIVDSKYFGRGIMIAILVNTLSMGIEYHEQPEELTNALEISNIVFTSLFALEMLLKLLVYGPFGYIKNPYNIFDGVIVVISVWEIVGQQGGGLSVLRTFRLMRVLKLVRFLPALQRQLVVLMKTMDNVATFCMLLMLFIFIFSILGMHLFGCKFASERDGDTLPDRKNFDSLLWAIVTVFQILTQEDWNKVLYNGMASTSSWAALYFIALMTFGNYVLFNLLVAILVEGFQAEEISKREDASGQLSCIQLPVDSQGGDANKSESEPDFFSPSLDGDGDRKKCLALVSLGEHPELRKSLLPPLIIHTAATPMSLPKSTSTGLGEALGPASRRTSSSGSAEPGAAHEMKSPPSARSSPHSPWSAASSWTSRRSSRNSLGRAPSLKRRSPSGERRSLLSGEGQESQDEEESSEEERASPAGSDHRHRGSLEREAKSSFDLPDTLQVPGLHRTASGRGSASEHQDCNGKSASGRLARALRPDDPPLDGDDADDEGNLSKGERVRAWIRARLPACCLERDSWSAYIFPPQSRFRLLCHRIITHKMFDHVVLVIIFLNCITIAMERPKIDPHSAERIFLTLSNYIFTAVFLAEMTVKVVALGWCFGEQAYLRSSWNVLDGLLVLISVIDILVSMVSDSGTKILGMLRVLRLLRTLRPLRVISRAQGLKLVVETLMSSLKPIGNIVVICCAFFIIFGILGVQLFKGKFFVCQGEDTRNITNKSDCAEASYRWVRHKYNFDNLGQALMSLFVLASKDGWVDIMYDGLDAVGVDQQPIMNHNPWMLLYFISFLLIVAFFVLNMFVGVVVENFHKCRQHQEEEEARRREEKRLRRLEKKRRNLMLDDVIASGSSASAASEAQCKPYYSDYSRFRLLVHHLCTSHYLDLFITGVIGLNVVTMAMEHYQQPQILDEALKICNYIFTVIFVLESVFKLVAFGFRRFFQDRWNQLDLAIVLLSIMGITLEEIEVNASLPINPTIIRIMRVLRIARVLKLLKMAVGMRALLDTVMQALPQVGNLGLLFMLLFFIFAALGVELFGDLECDETHPCEGLGRHATFRNFGMAFLTLFRVSTGDNWNGIMKDTLRDCDQESTCYNTVISPIYFVSFVLTAQFVLVNVVIAVLMKHLEESNKEAKEEAELEAELELEMKTLSPQPHSPLGSPFLWPGVEGPDSPDSPKPGALHPAAHARSASHFSLEHPTDRQLFDTISLLIQGSLEWELKLMDELAGPGGQPSAFPSAPSLGGSDPQMQPHPTELPGPDLLTVRKSGVSRTHSLPNDSYMCRHGSTAEGPLGHRGWGLPKAQSGSVLSVHSQPADTSYILQLPKDAPHLLQPHSAPTWGTIPKLPPPGRSPLAQRPLRRQAAIRTDSLDVQGLGSREDLLAEVSGPSPPLARAYSFWGQSSTQAQQHSRSHSKISKHMTPPAPCPGPEPNWGKGPPETRSSLELDTELSWISGDLLPPGGQEEPPSPRDLKKCYSVEAQSCQRRPTSWLDEQRRHSIAVSCLDSGSQPHLGTDPSNLGGQPLGGPGSRPKKKLSPPSITIDPPESQGPRTPPSPGICLRRRAPSSDSKDPLASGPPDSMAASPSPKKDVLSLSGLSSDPADLDPXVLPHFPTHLSPLGAKS

SEQ ID NO: 846 - protein, 2283 aa, Homo Sapiens
  misc_feature (2267)..(2267): Xaa can be any naturally occurring amino acid
MDEEEDGAGAEESGQPRSFMRLNDLSGAGGRPGPGSAEKDPGSADSEAEGLPYPALAPVVFFYLSQDSRPRSWCLRTVCNPWFERISMLVILLNCVTLGMFRPCEDIACDSQRCRILQAFDDFIFAFFAVEMVVKMVALGIFGKKCYLGDTWNRLDFFIVIAGMLEYSLDLQNVSFSAVRTVRVLRPLRAINRVPSMRILVTLLLDTLPMLGNVLLLCFFVFFIFGIVGVQLWAGLLRNRCFLPENFSLPLSVDLERYYQTENEDESPFICSQPRENGMRSCRSVPTLRGDGGGGPPCGLDYEAYNSSSNTTCVNWNQYYTNCSAGEHNPFKGAINFDNIGYAWIAIFQVITLEGWVDIMYFVMDAHSFYNFIYFILLIIVGSFFMINLCLVVIATQFSETKQRESQLMREQRVRFLSNASTLASFSEPGSCYEELLKYLVYILRKAARRLAQVSRAAGVRVGLLSSPAPLGGQETQPSSSCSRSHRRLSVHHLVHHHHHHHHHYHLGNGTLRAPRASPEIQDRDANGSRRLMLPPPSTPALSGAPPGGAESVHSFYHADCHLEPVRCQAPPPRSPSEASGRTVGSGKVYPTVHTSPPPETLKEKALVEVAASSGPPTLTSLNIPPGPYSSMHKLLETQSTGACQSSCKISSPCLKADSGACGPDSCPYCARAGAGEVELADREMPDSDSEAVYEFTQDAQHSDLRDPHSRRQRSLGPDAEPSSVLAFWRLICDTFRKIVDSKYFGRGIMIAILVNTLSMGIEYHEQPEELTNALEISNIVFTSLFALEMLLKLLVYGPFGYIKNPYNIFDGVIVVISVWEIVGQQGGGLSVLRTFRLMRVLKLVRFLPALQRQLVVLMKTMDNVATFCMLLMLFIFIFSILGMHLFGCKFASERDGDTLPDRKNFDSLLWAIVTVFQILTQEDWNKVLYNGMASTSSWAALYFIALMTFGNYVLFNLLVAILVEGFQAEEISKREDASGQLSCIQLPVDSQGGDANKSESEPDFFSPSLDGDGDRKKCLALVSLGEHPELRKSLLPPLIIHTAATPMSLPKSTSTGLGEALGPASRRTSSSGSAEPGAAHEMKSPPSARSSPHSPWSAASSWTSRRSSRNSLGRAPSLKRRSPSGERRSLLSGEGQESQDEEESSEEERASPAGSDHRHRGSLEREAKSSFDLPDTLQVPGLHRTASGRGSASEHQDCNGKSASGRLARALRPDDPPLDGDDADDEGNLSKGERVRAWIRARLPACCLERDSWSAYIFPPQSRFRLLCHRIITHKMFDHVVLVIIFLNCITIAMERPKIDPHSAERIFLTLSNYIFTAVFLAEMTVKVVALGWCFGEQAYLRSSWNVLDGLLVLISVIDILVSMVSDSGTKILGMLRVLRLLRTLRPLRVISRAQGLKLVVETLMSSLKPIGNIVVICCAFFIIFGILGVQLFKGKFFVCQGEDTRNITNKSDCAEASYRWVRHKYNFDNLGQALMSLFVLASKDGWVDIMYDGLDAVGVDQQPIMNHNPWMLLYFISFLLIVAFFVLNMFVGVVVENFHKCRQHQEEEEARRREEKRLRRLEKKRRKAQCKPYYSDYSRFRLLVHHLCTSHYLDLFITGVIGLNVVTMAMEHYQQPQILDEALKICNYIFTVIFVLESVFKLVAFGFRRFFQDRWNQLDLAIVLLSIMGITLEEIEVNASLPINPTIIRIMRVLRIARVLKLLKMAVGMRALLDTVMQALPQVGNLGLLFMLLFFIFAALGVELFGDLECDETHPCEGLGRHATFRNFGMAFLTLFRVSTGDNWNGIMKDTLRDCDQESTCYNTVISPIYFVSFVLTAQFVLVNVVIAVLMKHLEESNKEAKEEAELEAELELEMKTLSPQPHSPLGSPFLWPGVEGPDSPDSPKPGALHPAAHARSASHFSLEHPTMQPHPTELPGPDLLTVRKSGVSRTHSLPNDSYMCRHGSTAEGPLGHRGWGLPKAQSGSVLSVHSQPADTSYILQLPKDAPHLLQPHSAPTWGTIPKLPPPGRSPLAQRPLRRQAAIRTDSLDVQGLGSREDLLAEVSGPSPPLARAYSFWGQSSTQAQQHSRSHSKISKHMTPPAPCPGPEPNWGKGPPETRSSLELDTELSWISGDLLPPGGQEEPPSPRDLKKCYSVEAQSCQRRPTSWLDEQRRHSIAVSCLDSGSQPHLGTDPSNLGGQPLGGPGSRPKKKLSPPSITIDPPESQGPRTPPSPGICLRRRAPSSDSKDPLASGPPDSMAASPSPKKDVLSLSGLSSDPADLDPXVLPHFPTHLSPLGAKS

SEQ ID NO: 847 - protein, 2267 aa, Homo Sapiens
  misc_feature (2251)..(2251): Xaa can be any naturally occurring amino acid
MDEEEDGAGAEESGQPRSFMRLNDLSGAGGRPGPGSAEKDPGSADSEAEGLPYPALAPVVFFYLSQDSRPRSWCLRTVCNPWFERISMLVILLNCVTLGMFRPCEDIACDSQRCRILQAFDDFIFAFFAVEMVVKMVALGIFGKKCYLGDTWNRLDFFIVIAGMLEYSLDLQNVSFSAVRTVRVLRPLRAINRVPSMRILVTLLLDTLPMLGNVLLLCFFVFFIFGIVGVQLWAGLLRNRCFLPENFSLPLSVDLERYYQTENEDESPFICSQPRENGMRSCRSVPTLRGDGGGGPPCGLDYEAYNSSSNTTCVNWNQYYTNCSAGEHNPFKGAINFDNIGYAWIAIFQVITLEGWVDIMYFVMDAHSFYNFIYFILLIIVGSFFMINLCLVVIATQFSETKQRESQLMREQRVRFLSNASTLASFSEPGSCYEELLKYLVYILRKAARRLAQVSRAAGVRVGLLSSPAPLGGQETQPSSSCSRSHRRLSVHHLVHHHHHHHHHYHLGNGTLRAPRASPEIQDRDANGSRRLMLPPPSTPALSGAPPGGAESVHSFYHADCHLEPVRCQAPPPRSPSEASGRTVGSGKVYPTVHTSPPPETLKEKALVEVAASSGPPTLTSLNIPPGPYSSMHKLLETQSTGACQSSCKISSPCLKADSGACGPDSCPYCARAGAGEVELADREMPDSDSEAVYEFTQDAQHSDLRDPHSRRQRSLGPDAEPSSVLAFWRLICDTFRKIVDSKYFGRGIMIAILVNTLSMGIEYHEQPEELTNALEISNIVFTSLFALEMLLKLLVYGPFGYIKNPYNIFDGVIVVISVWEIVGQQGGGLSVLRTFRLMRVLKLVRFLPALQRQLVVLMKTMDNVATFCMLLMLFIFIFSILGMHLFGCKFASERDGDTLPDRKNFDSLLWAIVTVFQILTQEDWNKVLYNGMASTSSWAALYFIALMTFGNYVLFNLLVAILVEGFQAEGDANKSESEPDFFSPSLDGDGDRKKCLALVSLGEHPELRKSLLPPLIIHTAATPMSLPKSTSTGLGEALGPASRRTSSSGSAEPGAAHEMKSPPSARSSPHSPWSAASSWTSRRSSRNSLGRAPSLKRRSPSGERRSLLSGEGQESQDEEESSEEERASPAGSDHRHRGSLEREAKSSFDLPDTLQVPGLHRTASGRGSASEHQDCNGKSASGRLARALRPDDPPLDGDDADDEGNLSKGERVRAWIRARLPACCLERDSWSAYIFPPQSRFRLLCHRIITHKMFDHVVLVIIFLNCITIAMERPKIDPHSAERIFLTLSNYIFTAVFLAEMTVKVVALGWCFGEQAYLRSSWNVLDGLLVLISVIDILVSMVSDSGTKILGMLRVLRLLRTLRPLRVISRAQGLKLVVETLMSSLKPIGNIVVICCAFFIIFGILGVQLFKGKFFVCQGEDTRNITNKSDCAEASYRWVRHKYNFDNLGQALMSLFVLASKDGWVDIMYDGLDAVGVDQQPIMNHNPWMLLYFISFLLIVAFFVLNMFVGVVVENFHKCRQHQEEEEARRREEKRLRRLEKKRRSKEKQMAEAQCKPYYSDYSRFRLLVHHLCTSHYLDLFITGVIGLNVVTMAMEHYQQPQILDEALKICNYIFTVIFVLESVFKLVAFGFRRFFQDRWNQLDLAIVLLSIMGITLEEIEVNASLPINPTIIRIMRVLRIARVLKLLKMAVGMRALLDTVMQALPQVGNLGLLFMLLFFIFAALGVELFGDLECDETHPCEGLGRHATFRNFGMAFLTLFRVSTGDNWNGIMKDTLRDCDQESTCYNTVISPIYFVSFVLTAQFVLVNVVIAVLMKHLEESNKEAKEEAELEAELELEMKTLSPQPHSPLGSPFLWPGVEGPDSPDSPKPGALHPAAHARSASHFSLEHPTMQPHPTELPGPDLLTVRKSGVSRTHSLPNDSYMCRHGSTAEGPLGHRGWGLPKAQSGSVLSVHSQPADTSYILQLPKDAPHLLQPHSAPTWGTIPKLPPPGRSPLAQRPLRRQAAIRTDSLDVQGLGSREDLLAEVSGPSPPLARAYSFWGQSSTQAQQHSRSHSKISKHMTPPAPCPGPEPNWGKGPPETRSSLELDTELSWISGDLLPPGGQEEPPSPRDLKKCYSVEAQSCQRRPTSWLDEQRRHSIAVSCLDSGSQPHLGTDPSNLGGQPLGGPGSRPKKKLSPPSITIDPPESQGPRTPPSPGICLRRRAPSSDSKDPLASGPPDSMAASPSPKKDVLSLSGLSSDPADLDPXVLPHFPTHLSPLGAKS

SEQ ID NO: 848 - protein, 2260 aa, Homo Sapiens
  misc_feature (2244)..(2244): Xaa can be any naturally occurring amino acid
MDEEEDGAGAEESGQPRSFMRLNDLSGAGGRPGPGSAEKDPGSADSEAEGLPYPALAPVVFFYLSQDSRPRSWCLRTVCNPWFERISMLVILLNCVTLGMFRPCEDIACDSQRCRILQAFDDFIFAFFAVEMVVKMVALGIFGKKCYLGDTWNRLDFFIVIAGMLEYSLDLQNVSFSAVRTVRVLRPLRAINRVPSMRILVTLLLDTLPMLGNVLLLCFFVFFIFGIVGVQLWAGLLRNRCFLPENFSLPLSVDLERYYQTENEDESPFICSQPRENGMRSCRSVPTLRGDGGGGPPCGLDYEAYNSSSNTTCVNWNQYYTNCSAGEHNPFKGAINFDNIGYAWIAIFQVITLEGWVDIMYFVMDAHSFYNFIYFILLIIVGSFFMINLCLVVIATQFSETKQRESQLMREQRVRFLSNASTLASFSEPGSCYEELLKYLVYILRKAARRLAQVSRAAGVRVGLLSSPAPLGGQETQPSSSCSRSHRRLSVHHLVHHHHHHHHHYHLGNGTLRAPRASPEIQDRDANGSRRLMLPPPSTPALSGAPPGGAESVHSFYHADCHLEPVRCQAPPPRSPSEASGRTVGSGKVYPTVHTSPPPETLKEKALVEVAASSGPPTLTSLNIPPGPYSSMHKLLETQSTGACQSSCKISSPCLKADSGACGPDSCPYCARAGAGEVELADREMPDSDSEAVYEFTQDAQHSDLRDPHSRRQRSLGPDAEPSSVLAFWRLICDTFRKIVDSKYFGRGIMIAILVNTLSMGIEYHEQPEELTNALEISNIVFTSLFALEMLLKLLVYGPFGYIKNPYNIFDGVIVVISVWEIVGQQGGGLSVLRTFRLMRVLKLVRFLPALQRQLVVLMKTMDNVATFCMLLMLFIFIFSILGMHLFGCKFASERDGDTLPDRKNFDSLLWAIVTVFQILTQEDWNKVLYNGMASTSSWAALYFIALMTFGNYVLFNLLVAILVEGFQAEGDANKSESEPDFFSPSLDGDGDRKKCLALVSLGEHPELRKSLLPPLIIHTAATPMSLPKSTSTGLGEALGPASRRTSSSGSAEPGAAHEMKSPPSARSSPHSPWSAASSWTSRRSSRNSLGRAPSLKRRSPSGERRSLLSGEGQESQDEEESSEEERASPAGSDHRHRGSLEREAKSSFDLPDTLQVPGLHRTASGRGSASEHQDCNGKSASGRLARALRPDDPPLDGDDADDEGNLSKGERVRAWIRARLPACCLERDSWSAYIFPPQSRFRLLCHRIITHKMFDHVVLVIIFLNCITIAMERPKIDPHSAERIFLTLSNYIFTAVFLAEMTVKVVALGWCFGEQAYLRSSWNVLDGLLVLISVIDILVSMVSDSGTKILGMLRVLRLLRTLRPLRVISRAQGLKLVVETLMSSLKPIGNIVVICCAFFIIFGILGVQLFKGKFFVCQGEDTRNITNKSDCAEASYRWVRHKYNFDNLGQALMSLFVLASKDGWVDIMYDGLDAVGVDQQPIMNHNPWMLLYFISFLLIVAFFVLNMFVGVVVENFHKCRQHQEEEEARRREEKRLRRLEKKRRKAQCKPYYSDYSRFRLLVHHLCTSHYLDLFITGVIGLNVVTMAMEHYQQPQILDEALKICNYIFTVIFVLESVFKLVAFGFRRFFQDRWNQLDLAIVLLSIMGITLEEIEVNASLPINPTIIRIMRVLRIARVLKLLKMAVGMRALLDTVMQALPQVGNLGLLFMLLFFIFAALGVELFGDLECDETHPCEGLGRHATFRNFGMAFLTLFRVSTGDNWNGIMKDTLRDCDQESTCYNTVISPIYFVSFVLTAQFVLVNVVIAVLMKHLEESNKEAKEEAELEAELELEMKTLSPQPHSPLGSPFLWPGVEGPDSPDSPKPGALHPAAHARSASHFSLEHPTMQPHPTELPGPDLLTVRKSGVSRTHSLPNDSYMCRHGSTAEGPLGHRGWGLPKAQSGSVLSVHSQPADTSYILQLPKDAPHLLQPHSAPTWGTIPKLPPPGRSPLAQRPLRRQAAIRTDSLDVQGLGSREDLLAEVSGPSPPLARAYSFWGQSSTQAQQHSRSHSKISKHMTPPAPCPGPEPNWGKGPPETRSSLELDTELSWISGDLLPPGGQEEPPSPRDLKKCYSVEAQSCQRRPTSWLDEQRRHSIAVSCLDSGSQPHLGTDPSNLGGQPLGGPGSRPKKKLSPPSITIDPPESQGPRTPPSPGICLRRRAPSSDSKDPLASGPPDSMAASPSPKKDVLSLSGLSSDPADLDPXVLPHFPTHLSPLGAKS

SEQ ID NO: 849 - protein, 1600 aa, Homo Sapiens
  misc_feature (1556)..(1556): Xaa can be any naturally occurring amino acid
MDEEEDGAGAEESGQPRSFMRLNDLSGAGGRPGPGSAEKDPGSADSEAEGLPYPALAPVVFFYLSQDSRPRSWCLRTVCNPWFERISMLVILLNCVTLGMFRPCEDIACDSQRCRILQAFDDFIFAFFAVEMVVKMVALGIFGKKCYLGDTWNRLDFFIVIAGMLEYSLDLQNVSFSAVRTVRVLRPLRAINRVPSMRILVTLLLDTLPMLGNVLLLCFFVFFIFGIVGVQLWAGLLRNRCFLPENFSLPLSVDLERYYQTENEDESPFICSQPRENGMRSCRSVPTLRGDGGGGPPCGLDYEAYNSSSNTTCVNWNQYYTNCSAGEHNPFKGAINFDNIGYAWIAIFQVITLEGWVDIMYFVMDAHSFYNFIYFILLIIVGSFFMINLCLVVIATQFSETKQRESQLMREQRVRFLSNASTLASFSEPGSCYEELLKYLVYILRKAARRLAQVSRAAGVRVGLLSSPAPLGGQETQPSSSCSRSHRRLSVHHLVHHHHHHHHHYHLGNGTLRAPRASPEIQDRDANGSRRLMLPPPSTPALSGAPPGGAESVHSFYHADCHLEPVRCQAPPPRSPSEASGRTVGSGKVYPTVHTSPPPETLKEKALVEVAASSGPPTLTSLNIPPGPYSSMHKLLETQSTGACQSSCKISSPCLKADSGACGPDSCPYCARAGAGEVELADREMPDSDSEAVYEFTQDAQHSDLRDPHSRRQRSLGPDAEPSSVLAFWRLICDTFRKIVDSKYFGRGIMIAILVNTLSMGIEYHEQPEELTNALEISNIVFTSLFALEMLLKLLVYGPFGYIKNPYNIFDGVIVVISVWEIVGQQGGGLSVLRTFRLMRVLKLVRFLPALQRQLVVLMKTMDNVATFCMLLMLFIFIFSILGMHLFGCKFASERDGDTLPDRKNFDSLLWAIVTVFQILTQEDWNKVLYNGMASTSSWAALYFIALMTFGNYVLFNLLVAILVEGFQAEEISKREDASGQLSCIQLPVDSQGGDANKSESEPDFFSPSLDGDGDRKKCLALVSLGEHPELRKSLLPPLIIHTAATPMSLPKSTSTGLGEALGPASRRTSSSGSAEPGAAHEMKSPPSARSSPHSPWSAASSWTSRRSSRNSLGRAPSLKRRSPSGERRSLLSGEGQESQDEEESSEEERASPAGSDHRHRGSLEREAKSSFDLPDTLQVPGLHRTASGRGSASEHQDCNGKSASGRLARALRPDDPPLDGDDADDEGNLSKGERVRAWIRARLPACCLERDSWSAYIFPPQSRFRLLCHRIITHKMFDHVVLVIIFLNCITIAMERPKIDPHSAERIFLTLSNYIFTAVFLAEMTVKVVALGWCFGEQAYLRSSWNVLDGLLVLISVIDILVSMVSDSGTKILGMLRVLRLLRTLRPLRVISRAQGLKLVVETLMSSLKPIGNIVVICCAFFIIFGILGVQLFKGKFFVCQGEDTRNITNKSDCAEASYRWVRHKYNFDNLGQVSPRLRGGAVVKEAGGGTGPCLVIPADSGGGGLHEEISPSHPLLSNHQHVAKPSPSHSAPKSGPMGSLAVLKDEETEAQRGXGACPGPQSYMVEQEAHVAVGAGSPGCESCANPDPTIVSSVTWSS

SEQ ID NO: 850 - protein, 131 aa, Homo Sapiens
  misc_feature (128)..(128): Xaa can be any naturally occurring amino acid
MGFRKFSPFLALSILVLYQAGSLQAAPFRSALESSPDPATLSKEDARLLLAALVQDYVQMKASELKQEQETQGSSSAAQKRACNTATCVTHRLAGLLSRSGGMVKSNFVPTNVGSKAFGRRRRDLQAXADE

SEQ ID NO: 851 - protein, 394 aa, Homo Sapiens
  misc_feature (371)..(371): Xaa can be any naturally occurring amino acid
MLGAVEGPRWKQAEDIRDIYDFRDVLGTGAFSEVILAEDKRTQKLVAIKCIAKEALEGKEGSMENEIAVLHKIKHPNIVALDDIYESGGHLYLIMQLVSGGELFDRIVEKGFYTERDASRLIFQVLDAVKYLHDLGIVHRDLKPENLLYYSLDEDSKIMISDFGLSKMEDPGSVLSTACGTPGYVAPEVLAQKPYSKAVDCWSIGVIAYILLCGYPPFYDENDAKLFEQILKAEYEFDSPYWDDISDSAKDFIRHLMEKDPEKRFTCEQALQHPWIAGDTALDKNIHQSVSEQIKKNFAKSKWKQAFNATAVVRHMRKLQLGTSQEGQGQTASHGELLTPVAGGPAAGCCCRDCCVEPGTELSPTLPHQLXGPGPRVMILCVGGLGGSLLPFPP

SEQ ID NO: 852 - protein, 187 aa, Homo Sapiens
  misc_feature (171)..(171): Xaa can be any naturally occurring amino acid
MKTQRDGHSLGRWSLVLLLLGLVMPLAIIAQVLSYKEAVLRAIDGINQRSSDANLYRLLDLDPRPTMDGDPDTPKPVSFTVKETVCPRTTQQSPEDCDFKKDGLVKRCMGTVTLNQARGSFDISCDKDNKRFALLGDFFRKSKEKIGKEFKRIVQRIKDFLRNLVPRTESXCVPYPGSGFWALRNKL

SEQ ID NO: 853 - protein, 487 aa, Homo Sapiens
  misc_feature (478)..(478): Xaa can be any naturally occurring amino acid
MANMQGLVERLERAVSRLESLSAESHRPPGNCGEVNGVIAGVAPSVEAFDKLMDSMVAEFLKNSRILAGDVETHAEMVHSAFQAQRAFLLMASQYQQPHENDVAALLKPISEKIQEIQTFRERNRGSNMFNHLSAVSESIPALGWIAVSPKPGPYVKEMNDAATFYTNRVLKDYKHSDLRHVDWVKSYLNIWSELQAYIKEHHTTGLTWSKTGPVASTVSAFSVLSSGPGLPPPPPPLPPPGPPPLFENEGKKEESSPSRSALFAQLNQGEAITKGLRHVTDDQKTYKNPSLRAQGGQTQSPTKSHTPSPTSPKSYPSQKHAPVLELEGKKWRVEYQEDRNDLVISETELKQVAYIFKCEKSTIQIKGKVNSIIIDNCKKLGLVFDNVVGIVEVINSQDIQIQVMGRVPTISINKTEGCHIYLSEDALDCEIVSAKSSEMNILIPQDGDYREFPIPEQFKTAWDGSKLITEPAEIMAXLPERPNPLT

SEQ ID NO: 854 - protein, 2007 aa, Homo Sapiens
  misc_feature (1983)..(1983): Xaa can be any naturally occurring amino acid
MAADDDNGDGTSLFDVFSASPLKNNDEGSLDIYAGLDSAVSDSASKSCVPSRNCLDLYEEILTEEGTAKEATYNDLQVEYGKCQLQMKELMKKFKEIQTQNFSLINENQSLKKNISALIKTARVEINRKDEEISNLHQRLSEFPHFRNNHKTARTFDTVKTKDLKSRSPHLDDCSKTDHRAKSDVSKDVHHSTSLPNLEKEGKPHSDKRSTSHLPTSVEKHCTNGVWSRSHYQVGEGSSNEDSRRGRKDIRHSQFNRGTERVRKDLSTGCGDGEPRILEASQRLQGHPEKYGKGEPKTESKSSKFKSNSDSDYKGERINSSWEKETPGERSHSRVDSQSDKKLERQSERSQNINRKEVKSQDKEERKVDQKPKSVVKDQDHWRRSERASLPHSKNEITFSHNSSKYHLEERRGWEDCKRDKSVNSHSFQDGRCPSSLSNSRTHKNIDSKEVDAMHQWENTPLKAERHRTEDKRKREQESKEENRHIRNEKRVPTEHLQKTNKETKKTTTDLKKQNEPKTDKGEVLDNGVSEGADNKELAMKAESGPNETKNKDLKLSFMKKLNLTLSPAKKQPVSQDNQHKITDIPKSSGVCDSESSMQVKTVAYVPSISEHILGEAAVSEHTMGETKSTLLEPKVALLAVTEPRIGISETNKEDENSLLVRSVDNTMHCEEPICGTETSFPSPMEIQQTESLFPSTGMKQTINNGRAAAPVVMDVLQTDVSQNFGLELDTKRNDNSDYCGISEGMEMKVALSTTVSETTESILQPSIEEADILPIMLSEDNNPKFEPSVIVTPLVESKSCHLEPCLPKETLDSSLQQTELMDHRMATGETNSVYHDDDNSVLSIDLNHLRPIPEAISPLNSPVRPVAKVLRNESPPQVPVYNNSHKDVFLPNSAHSTSKSQSDLNKENQKPIYKSDKCTEADTCKNSPLDELEEGEIRSDSETSKPQESFEKNSKRRVSADVRKSKTIPRRGKSTVCLDKDSRKTHVRIHQTNNKWNKRPDKSSRSSKTEKKDKVMSTSSLEKIVPIIAVPSSEQEIMHMLRMIRKHVRKNYMKFKAKFSLIQFHRIIESAILSFTSLIKHLNLHKISKSVTTLQKNLCDIIESKLKQVKKNGIVDRLFEQQLPDMKKKLWKFVDDQLDYLFAKLKKILVCDSKSFGRDSDEGKLEKTSKQNAQYSNSQKRSVDNSNRELLKEKLSKSEDPVHYKSLVGCKKSEENYQDQNNSSINTVKHDIKKNFNICFDNIKNSQSEERSLEVHCPSTPKSEKNEGSSIEDAQTSQHATLKPERSFEILTEQQASSLTFNLVSDAQMGEIFKSLLQGSDLLDSSVNCTEKSEWELKTPEKQLLETLKCESIPACTTEELVSGVASPCPKMISDDNWSLLSSEKGPSLSSGLSLPVHPDVLDESCMFEVSTNLPLSKDNVCSVEKSKPCVSSILLEDLAVSLTVPSPLKSDGHLSFLKPDMSSSSTPEEVISAHFSEDALLEEEDASEQDIHLALESDNSSSKSSCSSSWTSRSVAPGFQYHPNLPMHAVIMEKSNDHFIVKIRRATPSTSSGLKQSMMPDELLTSLPRHGKEADEGPEKEYISCQNTVFKSVEELENSNKNVDGSKSTHEEQSSMIQTQVPDIYEFLKDASDKMGHSDEVADECFKLHQVWETKVPESIEELPSMEEISHSVGEHLPNTYVDLTKDPVTETKNLGEFIEVTVLHIDQLGCSGGNLNQSAQILDNSLQADTVGAFIDLTQDASSEAKSEGNHPALAVEDLGCGVIQVDEDNCKEEKAQVANRPLKCIVEETYIDLTTESPSSCEVKKDELKSEPGSNCDNSELPGTLHNSHKKRRNISDLNHPHKKQRKETDLTNKEKTKKPTQDSCENTEAHQKKASKKKAPPVTKDPSSLKATPGIKDSSAALATSTSLSAKNVIKKKGEIIILWTRNDDREILLECQKRGPSFKTFAYLAAKLDKNPNQVSERFQQLMKLFEKSKCRXVAEFLGLLTDIAYYTEASNSSCFK

SEQ ID NO: 855 - protein, 142 aa, Homo Sapiens
  misc_feature (116)..(116): Xaa can be any naturally occurring amino acid
MNSGVCLCVLMAVLAAGALTQPVPPADPAGSGLQRAEEAPRRQLRVSQRTDGESRAHLGALLARYIQQARKAPSGRMSIVKNLQNLDPSHRISDRDYMGWMDFGRRSAEEYEYPSXRTQPPSAQREATSQPRGGRIRKQSHS

SEQ ID NO: 856 - protein, 102 aa, Homo Sapiens
  misc_feature (95)..(95): Xaa can be any naturally occurring amino acid
MAPLKMLALVTLLLGASLQHIHAARGTNVGRECCLEYFKGAIPLRKLKTWYQTSEDCSRDAIVFVTVQGRAICSDPNNKRVKNAVKYLQSLERSXSLLTPDS

SEQ ID NO: 857 - protein, 142 aa, Homo Sapiens
  misc_feature (97)..(97): Xaa can be any naturally occurring amino acid
MCCTKSLLLAALMSVLLLHLCGESEAASNFDCCLGYTDRILHPKFIVGFTRQLANEGCDINAIIFHTKKKLSVCANPKQTWVKYIVRLLSKKVKNMXKLWLFWNGIGHSPRTERTLLGLEVSLAHHGGFSAYLICASLDLSN

SEQ ID NO: 858 - protein, 116 aa, Homo Sapiens
  misc_feature (113)..(113): Xaa can be any naturally occurring amino acid
MKGPPTFCSLLLLSLLLSPDPTAAFLLPPSTACCTQLYRKPLSDKLLRKVIQVELQEADGDCHLQAFVLHLAQRSICIHPQNPSLSQWFEHQERKLHGTLPKLNFGMLRKMGXSPQ

SEQ ID NO: 859 - protein, 585 aa, Homo Sapiens
  misc_feature (544)..(544): Xaa can be any naturally occurring amino acid
MMPTPVILLKEGTDSSQGIPQLVSNISACQVIAEAVRTTLGPRGMDKLIVDGRGKATISNDGATILKLLDVVHPAAKTLVDIAKSQDAEVGDGTTSVTLLAAEFLKQVKPYVEEGLHPQIIIRAFRTATQLAVNKIKEIAVTVKKADKVEQRKLLEKCAMTALSSKLISQQKAFFAKMVVDAVMMLDDLLQLKMIGIKKVQGGALEDSQLVAGVAFKKTFSYAGFEMQPKKYHNPKIALLNVELELKAEKDNAEIRVHTVEDYQAIVDAEWNILYDKLEKIHHSGAKVVLSKLPIGDVATQYFADRDMFCAGRVPEEDLKRTMMACGGSIQTSVNALSADVLGRCQVFEETQIGGERYNFFTGCPKAKTCTFILRGGAEQFMEETERSLHDAIMIVRRAIKNDSVVAGGGAIEMELSKYLRDYSRTIPGKQQLLIGAYAKALEIIPRQLCDNAGFDATNILNKLRARHAQGGTWYGVDINNEDIADNFEAFVWEPAMVRINALTAASEAACLIVSVDETIKNPRSTVDAPTAAGRGRGRGRPHXEAPHPSHGWLAAGCTYPPWLGYFILQGRGSNWPTLFLLEAI

SEQ ID NO: 860 - protein, 557 aa, Homo Sapiens
  misc_feature (549)..(549): Xaa can be any naturally occurring amino acid
MALHVPKAPGFAQMLKEGAKHFSGLEEAVYRNIQACKELAQTTRTAYGPNGMNKMVINHLEKLFVTNDAATILRELEVQHPAAKMIVMASHMQEQEVGDGTNFVLVFAGALLELAEELLRIGLSVSEVIEGYEIACRKAHEILPNLVCCSAKNLRDIDEVSSLLRTSIMSKQYGNEVFLAKLIAQACVSIFPDSGHFNVDNIRVCKILGSGISSSSVLHGMVFKKETEGDVTSVKDAKIAVYSCPFDGMITETKGTVLIKTAEELMNFSKGEENLMDAQVKAIADTGANVVVTGGKVADMALHYANKYNIMLVRLNSKWDLRRLCKTVGATALPRLTPPVLEEMGHCDSVYLSEVGDTQVVVFKHEKEDGAISTIVLRGSTDNLMDDIERAVDDGVNTFKVLTRDKRLVPGGGATEIELAKQITSYGETCPGLEQYAIKKFAEAFEAIPRALAENSGVKANEVISKLYAVHQEGNKNVGLDIEAEVPAVKDMLEAGILDTYLGKYWAIKLATNAAVTVLRVDQIIMAKPAGGPKPPSGKKDWDDDQNDXNWLNFYCR

SEQ ID NO: 861 - protein, 188 aa, Homo Sapiens
  misc_feature (183)..(183): Xaa can be any naturally occurring amino acid
MEQGKGLAVLILAIILLQGTLAQSIKGNHLVKVYDYQEDGSVLLTCDAEAKNITWFKDGKMIGFLTEDKKKWNLGSNAKDPRGMYQCKGSQNKSKPLQVYYRMCQNCIELNAATISGFLFAEIVSIFVLAVGVYFIAGQDGVRQSRASDKQTLLPNDQLYQPLKDREDDQYSHLQGNQLRRNXTQDSE

SEQ ID NO: 862 - protein, 514 aa, Homo Sapiens
  misc_feature (459)..(459): Xaa can be any naturally occurring amino acid
MNRGVPFRHLLLVLQLALLPAATQGKKVVLGKKGDTVELTCTASQKKSIQFHWKNSNQIKILGNQGSFLTKGPSKLNDRADSRRSLWDQGNFPLIIKNLKIEDSDTYICEVEDQKEEVQLLVFGLTANSDTHLLQGQSLTLTLESPPGSSPSVQCRSPRGKNIQGGKTLSVSQLELQDSGTWTCTVLQNQKKVEFKIDIVVLAFQKASSIVYKKEGEQVEFSFPLAFTVEKLTGSGELWWQAERASSSKSWITFDLKNKEVSVKRVTQDPKLQMGKKLPLHLTLPQALPQYAGSGNLTLALEAKTGKLHQEVNLVVMRATQLQKNLTCEVWGPTSPKLMLSLKLENKEAKVSKREKAVWVLNPEAGMWQCLLSDSGQVLLESNIKVLPTWSTPVQPMALIVLGGVAGLLLFIGLGIFFCVRCRHRRRQAERMSQIKRLLSEKKTCQCPHRFQKTCSPIXGTRPGRSHLQPPQVSAPRFLPADQMNVADPQPLASCSPPLQFAIVSPGLGPGFTG

SEQ ID NO: 863 - protein, 386 aa, Homo Sapiens
  misc_feature (382)..(382): Xaa can be any naturally occurring amino acid
MTVARPSVPAALPLLGELPRLLLLVLLCLPAVWGDCGLPPDVPNAQPALEGRTSFPEDTVITYKCEESFVKIPGEKDSVICLKGSQWSDIEEFCNRSCEVPTRLNSASLKQPYITQNYFPVGTVVEYECRPGYRREPSLSPKLTCLQNLKWSTAVEFCKKKSCPNPGEIRNGQIDVPGGILFGATISFSCNTGYKLFGSTSSFCLISGSSVQWSDPLPECREIYCPAPPQIDNGIIQGERDHYGYRQSVTYACNKGFTMIGEHSIYCTVNNDEGEWSGPPPECRGKSLTSKVPPTVQKPTTVNVPTTEVSPTSQKTTTKTTTPNAQATRSTPVSRTTKHFHETTPNKGSGTTSGTTRLLSGHTCFTLTGLLGTLVTMGLLTXPKKS

SEQ ID NO: 864 - protein, 353 aa, Homo Sapiens
  misc_feature (348)..(348): Xaa can be any naturally occurring amino acid
MALLFSLILAICTRPGFLASPSGVRLVGGLHRCEGRVEVEQKGQWGTVCDDGWDIKDVAVLCRELGCGAASGTPSGILYEPPAEKEQKVLIQSVSCTGTEDTLAQCEQEEVYDCSHDEDAGASCENPESSFSPVPEGVRLADGPGHCKGRVEVKHQNQWYTVCQTGWSLRAAKVVCRQLGCGRAVLTQKRCNKHAYGRKPIWLSQMSCSGREATLQDCPSGPWGKNTCNHDEDTWVECEDPFDLRLVGGDNLCSGRLEVLHKGVWGSVCDDNWGEKEDQVVCKQLGCGKSLSPSFRDRKCYGPGVGRIWLDNVRCSGEEQSLEQCQHRFWGFHDCTHQEDVAVICSGXYPGVA

SEQ ID NO: 865 - protein, 234 aa, Homo Sapiens
  misc_feature (211)..(211): Xaa can be any naturally occurring amino acid
MRPRLWLLLAAQLTVLHGNSVLQQTPAYIKVQTNKMVMLSCEAKISLSNMRIYWLRQRQAPSSDSHHEFLALWDSAKGTIHGEEVEQEKIAVFRDASRFILNLTSVKPEDSGIYFCMIVGSPELTFGKGTQLSVVDFLPTTAQPTKKSTLKKRVCRLPRPETQKGPLCSPITLGLLVAGVLVLLVSLGVAIHLCCRRRRARLRFMKQFYKXAENTVLVSCYKKTSVSNEHDVEK

SEQ ID NO: 866 - protein, 155 aa, Homo Sapiens
  misc_feature (147)..(147): Xaa can be any naturally occurring amino acid
MAQKRPACTLKPECVQQLLVCSQEAKKSAYCPYSHFPVGAALLTQEGRIFKGCNIENACYPLGICAERTAIQKAVSEGYKDFRAIAIASDMQDDFISPCGACRQVMREFGTNWPVYMTKPDGTYIVMTVQELLPSSFGPEDLQKTQXQPENAHCL

SEQ ID NO: 867 - protein, 402 aa, Homo Sapiens
  misc_feature (392)..(392): Xaa can be any naturally occurring amino acid
MPGPQGGRGAATMSLGKLSPVGWVSSSQGKRRLTADMISHPLGDFRHTMHVGRGGDVFGDTSFLSNHGGSSGSTHRSPRSFLAKKLQLVRRVGAPPRRMASPPAPSPAPPAISPIIKNAISLPQLNQAAYDSLVVGKLSFDSSPTSSTDGHSSYGLDSGFCTISRLPRSEKPHDRDRDGSFPSEPGLRRSDSLLSFRLDLDLGPSLLSELLGVMSLPEAPAAETPAPAANPPAPTANPTGPAANPPATTANPPAPAANPSAPAATPTGPAANPPAPAASSTPHGHCPNGVTAGLGPVAEVKSSPVGGGPRGPAGPALGRHWGAGWDGGHHYPEMDARQERVEVLPQARASWESLDEEWRAPQAGSRTPVPSTVQANTFEFADAEEDDEVKVXGAGARSQGPT

SEQ ID NO: 868 - protein, 800 aa, Homo Sapiens
  misc_feature (795)..(795): Xaa can be any naturally occurring amino acid
MLTRNCLSLLLWVLFDGGLLTPLQPQPQQTLATEPRENVIHLPGQRSHFQRVKRGWVWNQFFVLEEYVGSEPQYVGKLHSDLDKGEGTVKYTLSGDGAGTVFTIDETTGDIHAIRSLDREEKPFYTLRAQAVDIETRKPLEPESEFIIKVQDINDNEPKFLDGPYVATVPEMSPVGAYVLQVKATDADDPTYGNSARVVYSILQGQPYFSIDPKTGVIRTALPNMDREVKEQYQVLIQAKDMGGQLGGLAGTTIVNITLTDVNDNPPRFPKSIFHLKVPESSPIGSAIGRIRAVDPDFGQNAEIEYNIVPGDGGNLFDIVTDEDTQEGVIKLKKPLDFETKKAYTFKVEASNLHLDHRFHSAGPFKDTATVKISVLDVDEPPVFSKPLYTMEVYEDTPVGTIIGAVTAQDLDVGSSAVRYFIDWKSDGDSYFTIDGNEGTIATNELLDRESTAQYNFSIIASKVSNPLLTSKVNILINVLDVNEFPPEISVPYETAVCENAKPGQIIQIVSAADRDLSPAGQQFSFRLSPEAAIKPNFTVRDFRNNTAGIETRRNGYSRRQQELYFLPVVIEDSSYPVQSSTNTMTIRVCRCDSDGTILSCNVEAIFLPVGLSTGALIAILLCIVILLAIVVLYVALRRQKKKDTLMTSKEDIRDNVIHYDDEGGGEEDTQAFDIGALRNPKVIEENKIRRDIKPDSLCLPRQRPPMEDNTDIRDFIHQRLQENDVDPTAPPYDSLATYAYEGSGSVAESLSSIDSLTTEADQDYDYLTDWGPRFKVLADMFGEEESYNPDKVTXGSRGG

SEQ ID NO: 869 - protein, 866 aa, Homo Sapiens
  misc_feature (830)..(830): Xaa can be any naturally occurring amino acid
MGLPRGPLASLLLLQVCWLQCAASEPCRAVFREAEVTLEAGGAEQEPGQALGKVFMGCPGQEPALFSTDNDDFTVRNGETVQERRSLKERNPLKIFPSKRILRRHKRDWVVAPISVPENGKGPFPQRLNQLKSNKDRDTKIFYSITGPGADSPPEGVFAVEKETGWLLLNKPLDREEIAKYELFGHAVSENGASVEDPMNISIIVTDQNDHKPKFTQDTFRGSVLEGVLPGTSVMQVTATDEDDAIYTYNGVVAYSIHSQEPKDPHDLMFTIHRSTGTISVISSGLDREKVPEYTLTIQATDMDGDGSTTTAVAVVEILDANDNAPMFDPQKYEAHVPENAVGHEVQRLTVTDLDAPNSPAWRATYLIMGGDDGDHFTITTHPESNQGILTTRKGLDFEAKNQHTLYVEVTNEAPFVLKLPTSTATIVVHVEDVNEAPVFVPPSKVVEVQEGIPTGEPVCVYTAEDPDKENQKISYRILRDPAGWLAMDPDSGQVTAVGTLDREDEQFVRNNIYEVMVLAMDNGSPPTTGTGTLLLTLIDVNDHGPVPEPRQITICNQSPVRQVLNITDKDLSPHTSPFQAQLTDDSDIYWTAEVNEEGDTVVLSLKKFLKQDTYDVHLSLSDHGNKEQLTVIRATVCDCHGHVETCPGPWKGGFILPVLGAVLALLFLLLVLLLLVRKKRKIKEPLLLPEDDTRDNVFYYGEEGGGEEDQDYDITQLHRGLEARPEVVLRNDVAPTIIPTPMYRPRPANPDEIGNFIIENLKAANTDPTAPPYDTLLVFDYEGSGSDAASLSSLTSSASDQDQDYDYLNEWGSRFKKLADMYGGGEDDXAACLQGWGPNVRPQSISKGSQFPLQLRTSELVRKWP

SEQ ID NO: 870 - protein, 458 aa, Homo Sapiens
  misc_feature (455)..(455): Xaa can be any naturally occurring amino acid
MLAENLVEEFEMKEDEPWYDHQDLQQDLQLAAELGKTLLDRNTELEDSVQQMYTTNQEQLQEIEYLTKQVELLRQMNEQHAKVYEQLDVTARELEETNQKLVADSKASQQKILSLTETIECLQTNIDHLQSQVEELKSSGQGRRSPGKCDQEKPAPSFACLKELYDLRQHFVYDHVFAEKITSLQGQPSPDEEENEHLKKTVTMLQAQLSLERQKRVTMEEEYGLVLKENSELEQQLGATGAYRARALELEAEVAEMRQMLQSEHPFVNGVEKLVPDSLYVPFKEPSQSLLEEMFLTVPESHRKPLKRSSSETILSSLAGSDIVKGHEETCIRRAKAVKQRGISLLHEVDTQYSALKVKYEELLKKCQEEQDSLSHKAVQTSRAAAKDLTGVNAQSEPVASGWELASVNPEPVSSPTTPPEYKALFKEIFSCIKKTKQEIDEQRTKYRSLSSHSXLNL

SEQ ID NO: 871 - protein, 358 aa, Homo Sapiens
  misc_feature (346)..(346): Xaa can be any naturally occurring amino acid
MQRLVAWDPACLPLPPPPPAFKSMEVANFYYEADCLAAAYGGKAAPAAPPAARPGPRPPAGELGSIGDHERAIDFSPYLEPLGAPQAPAPATATDTFEAAPPAPAPAPASSGQHHDFLSDLFSDDYGGKNCKKPAEYGYVSLGRLGAAKGALHPGCFAPLHPPPPPPPPPAELKAEPGFEPADCKRKEEAGAPGGGAGMAAGFPYALRAYLGYQAVPSGSSGSLSTSSSSSPPGTPSPADAKAPPTACYAGAAPAPSQVKSKAKKTVDKHSDEYKIRRERNNIAVRKSRDKAKMRNLETQHKVLELTAENERLQKKVEQLSRELSTLRNLFKQLPEPLLASSGHCXRGPRARPPAGRG

SEQ ID NO: 872 - protein, 2475 aa, Homo Sapiens
  misc_feature (2443)..(2443): Xaa can be any naturally occurring amino acid
METRSPGLNNMKPQSLQLVLEEQVLALQQQMAENQAASWRKLKNSQEAQQRQATLVRKLQAKVLQYRSWCQELEKRLEATGGPIPQRWENVEEPNLDELLVRLEEEQQRCESLAEVNTQLRLHMEKADVVNKALREDVEKLTVDWSRARDELMRKESQWQMEQEFFKGYLKGEHGRLLSLWREVVTFRRHFLEMKSATDRDLMELKAEHVRLSGSLLTCCLRLTVGAQSREPNGSGRMDGREPAQLLLLLAKTQELEKEAHERSQELIQLKSQGDLEKAELQDRVTELSALLTQSQKQNEDYEKMIKALRETVEILETNHTELMEHEASLSRNAQEEKLSLQQVIKDITQVMVEEGDNIAQGSGHENSLELDSSIFSQFDYQDADKALTLVRSVLTRRRQAVQDLRQQLAGCQEAVNLLQQQHDQWEEEGKALRQRLQKLTGERDTLAGQTVDLQGEVDSLSKERELLQKAREELRQQLEVLEQEAWRLRRVNVELQLQGDSAQGQKEEQQEELHLAVRERERLQEMLMGLEAKQSESLSELITLREALESSHLEGELLRQEQTEVTAALARAEQSIAELSSSENTLKTEVADLRAAAVKLSALNEALALDKVGLNQQLLQLEEENQSVCSRMEAAEQARNALQVDLAEAEKRREALWEKNTHLEAQLQKAEEAGAELQADLRDIQEEKEEIQKKLSESRHQQEAATTQLEQLHQEAKRQEEVLARAVQEKEALVREKAALEVRLQAVERDRQDLAEQLQGLSSAKELLESSLFEAQQQNSVIEVTKGQLEVQIQTVTQAKEVIQGEVRCLKLELDTERSQAEQERDAAARQLAQAEQEGKTALEQQKAAHEKEVNQLREKWEKERSWHQQELAKALESLEREKMELEMRLKEQQTEMEAIQAQREEERTQAESALCQMQLETEKERVSLLETLLQTQKELADASQQLERLRQDMKVQKLKEQETTGILQTQLQEAQRELKEAARQHRDDLAALQEESSSLLQDKMDLQKQVEDLKSQLVAQDDSQRLVEQEVQEKLRETQEYNRIQKELEREKASLTLSLMEKEQRLLVLQEADSIRQQELSALRQDMQEAQGEQKELSAQMELLRQEVKEKEADFLAQEAQLLEELEASHITEQQLRASLWAQEAKAAQLQLRLRSTESQLEALAAEQQPGNQAQAQAQLASLYSALQQALGSVCESRPELSGGGDSAPSVWGLEPDQNGARSLFKRGPLLTALSAEAVASALHKLHQDLWKTQQTRDVLRDQVQKLEERLTDTEAEKSQVHTELQDLQRQLSQNQEEKSKWEGKQNSLESELMELHETMASLQSRLRRAELQRMEAQGERELLQAAKENLTAQVEHLQAAVVEARAQASAAGILEEDLRTARSALKLKNEEVESERERAQALQEQGELKVAQGKALQENLALLTQTLAEREEEVETLRGQIQELEKQREMQKAALELLSLDLKKRNQEVDLQQEQIQELEKCRSVLEHLPMAVQEREQKLTVQREQIRELEKDRETQRNVLEHQLLELEKKDQMIESQRGQVQDLKKQLVTLECLALELEENHHKMECQQKLIKELEGQRETQRVALTHLTLDLEERSQELQAQSSQIHDLESHSTVLARELQERDQEVKSQREQIEELQRQKEHLTQDLERRDQELMLQKERIQVLEDQRTRQTKILEEDLEQIKLSLRERGRELTTQRQLMQERAEEGKGPSKAQRGSLEHMKLILRDKEKEVECQQEHIHELQELKDQLEQQLQGLHRKVGETSLLLSQREQEIVVLQQQLQEAREQGELKEQSLQSQLDEAQRALAQRDQELEALQQEQQQAQGQEERVKEKADALQGALEQAHMTLKERHGELQDHKEQARRLEEELAVEGRRVQALEEVLGDLRAESREQEKALLALQQQCAEQAQEHEVETRALQDSWLQAQAVLKERDQELEALRAESQSSRHQEEAARARAEALQEALGKAHAALQGKEQHLLEQAELSRSLEASTATLQASLDACQAHSRQLEEALRIQEGEIQDQDLRYQEDVQQLQQALAQRDEELRHQQEREQLLEKSLAQRVQENMIQEKQNLGQEREEEEIRGLHQSVRELQLTLAQKEQEILELRETQQRNNLEALPHSHKTSPMEEQSLKLDSLEPRLQRELERLQAALRQTEAREIEWREKAQDLALSLAQTKASVSSLQEVAMFLQASVLERDSEQQRLQDELELTRRALEKERLHSPGATSTAELGSRGEQGVQLGEVSGVEAEPSPDGMEKQSWRQRLEHLQQAVARLEIDRSRLQRHNVQLRSTLEQVERERRKLKREAMRAAQAGSLEISKATASSPTQQDGRGQKNSDAKCVAELQKEVVLLQAQLTLERKQKQDYITRSAQTSRELAGLHHSLSHSLLAVAQAPEATVLEAETRRLDESLTQSLTSPGPVLLHPSPSTTQAASRXQPQPGAHRQKTVSWVMAPPHTYRFAKGKAWLC

SEQ ID NO: 873 - protein, 504 aa, Homo Sapiens
  misc_feature (494)..(494): Xaa can be any naturally occurring amino acid
MLAATVLTLALLGNAHACSKGTSHEAGIVCRITKPALLVLNHETAKVIQTAFQRASYPDITGEKAMMLLGQVKYGLHNIQISHLSIASSQVELVEAKSIDVSIQNVSVVFKGTLKYGYTTAWWLGIDQSIDFEIDSAIDLQINTQLTCDSGRVRTDAPDCYLSFHKLLLHLQGEREPGWIKQLFTNFISFTLKLVLKGQICKEINVISNIMADFVQTRAASILSDGDIGVDISLTGDPVITASYLESHHKGHFIYKNVSEDLPLPTFSPTLLGDSRMLYFWFSERVFHSLAKVAFQDGRLMLSLMGDEFKAVLETWGFNTNQEIFQEVVGGFPSQAQVTVHCLKMPKISCQNKGVVVNSSVMVKFLFPRPDQQHSVAYTFEEDIVTTVQASYSKKKLFLSLLDFQITPKTVSNLTESSSESIQSFLQSMITAVGIPEVMSRLEVVFTALMNSKGVSLFDIINPEIITRDGFLLLQMDFGFPEHLLVDFLQSLSXKSPRRSGWGL

SEQ ID NO: 874 - protein, 775 aa, Homo Sapiens
  misc_feature (765)..(765): Xaa can be any naturally occurring amino acid
MGSNLSPQLCLMPFILGLLSGGVTTTPWSLARPQGSCSLEGVEIKGGSFRLLQEGQALEYVCPSGFYPYPVQTRTCRSTGSWSTLKTQDQKTVRKAECRAIHCPRPHDFENGEYWPRSPYYNVSDEISFHCYDGYTLRGSANRTCQVNGRWSGQTAICDNGAGYCSNPGIPIGTRKVGSQYRLEDSVTYHCSRGLTLRGSQRRTCQEGGSWSGTEPSCQDSFMYDTPQEVAEAFLSSLTETIEGVDAEDGHGPGEQQKRKIVLDPSGSMNIYLVLDGSDSIGASNFTGAKKCLVNLIEKVASYGVKPRYGLVTYATYPKIWVKVSEADSSNADWVTKQLNEINYEDHKLKSGTNTKKALQAVYSMMSWPDDVPPEGWNRTRHVIILMTDGLHNMGGDPITVIDEIRDLLYIGKDRKNPREDYLDVYVFGVGPLVNQVNINALASKKDNEQHVFKVKDMENLEDVFYQMIDESQSLSLCGMVWEHRKGTDYHKQPWQAKISVIRPSKGHESCMGAVVSEYFVLTAAHCFTVDDKEHSIKVSVGGEKRDLEIEVVLFHPNYNINGKKEAGIPEFYDYDVALIKLKNKLKYGQTIRPICLPCTEGTTRALRLPPTTTCQQQKEELLPAQDIKALFVSEEEKKLTRKEVYIKNGDKKGSCERDAQYAPGYDKVKDISEVVTPRFLCTGGVSPYADPNTCRGDSGGPLIVHKRSRFIQVGVISWGVVDVCKNQKRQKQVPAHARDFHINLFQVLPWLKEKLQDEDLGFLXGVSCWTGAWD

SEQ ID NO: 875 - protein, 258 aa, Homo Sapiens
  misc_feature (254)..(254): Xaa can be any naturally occurring amino acid
MHSWERLAVLVLLGAAACAAPPRGRILGGREAEAHARPYMASVQLNGAHLCGGVLVAEQWVLSAAHCLEDAADGKVQVLLGAHSLSQPEPSKRLYDVLRAVPHPDSQPDTIDHDLLLLQLSEKATLGPAVRPLPWQRVDRDVAPGTLCDVAGWGIVNHAGRRPDSLQHVLLPVLDRATCNRRTHHDGAITERLMCAESNRRDSCKGDSGGPLVCGGVLEGVVTSGSRVCGNRKKPGIYTRVASYAAWIDSVLAXGAGA

SEQ ID NO: 876 - protein, 1235 aa, Homo Sapiens
  misc_feature (1232)..(1232): Xaa can be any naturally occurring amino acid
MRLLAKIICLMLWAICVAEDCNELPPRRNTEILTGSWSDQTYPEGTQAIYKCRPGYRSLGNVIMVCRKGEWVALNPLRKCQKRPCGHPGDTPFGTFTLTGGNVFEYGVKAVYTCNEGYQLLGEINYRECDTDGWTNDIPICEVVKCLPVTAPENGKIVSSAMEPDREYHFGQAVRFVCNSGYKIEGDEEMHCSDDGFWSKEKPKCVEISCKSPDVINGSPISQKIIYKENERFQYKCNMGYEYSERGDAVCTESGWRPLPSCEEKSCDNPYIPNGDYSPLRIKHRTGDEITYQCRNGFYPATRGNTAKCTSTGWIPAPRCTLKPCDYPDIKHGGLYHENMRRPYFPVAVGKYYSYYCDEHFETPSGSYWDHIHCTQDGWSPAVPCLRKCYFPYLENGYNQNHGRKFVQGKSIDVACHPGYALPKAQTTVTCMENGWSPTPRCIRVKTCSKSSIDIENGFISESQYTYALKEKAKYQCKLGYVTADGETSGSITCGKDGWSAQPTCIKSCDIPVFMNARTKNDFTWFKLNDTLDYECHDGYESNTGSTTGSIVCGYNGWSDLPICYERECELPKIDVHLVPDRKKDQYKVGEVLKFSCKPGFTIVGPNSVQCYHFGLSPDLPICKEQVQSCGPPPELLNGNVKEKTKEEYGHSEVVEYYCNPRFLMKGPNKIQCVDGEWTTLPVCIVEESTCGDIPELEHGWAQLSSPPYYYGDSVEFNCSESFTMIGHRSITCIHGVWTQLPQCVAIDKLKKCKSSNLIILEEHLKNKKEFDHNSNIRYRCRGKEGWIHTVCINGRWDPEVNCSMAQIQLCPPPPQIPNSHNMTTTLNYRDGEKVSVLCQENYLIQEGEEITCKDGRWQSIPLCVEKIPCSQPPQIEHGTINSSRSSQESYAHGTKLSYTCEGGFRISEENETTCYMGKWSSPPQCEGLPCKSPPEISHGVVAHMSDSYQYGEEVTYKCFEGFGIDGPAIAKCLGEKWSHPPSCIKTDCLSLPSFENAIPMGEKKDVYKAGEQVTYTCATYYKMDGASNVTCINSRWTGRPTCRDTSCVNPPTVQNAYIVSRQMSKYPSGERVRYQCRSPYEMFGDEEVMCLNGNWTEPPQCKDSTGKCGPPPPIDNGDITSFPLSVYAPASSVEYQCQNLYQLEGNKRITCRNGQWSEPPKCLHPCVISREIMENYNIALRWTAKQKLYSRTGESVEFVCKRGYRLSSRSHTLRTTCWDGKLEYPTCAKRXNQS

SEQ ID NO: 877 - protein, 277 aa, Homo Sapiens
  misc_feature (271)..(271): Xaa can be any naturally occurring amino acid
MWLLVSVILISRISSVGGEAMFCDFPKINHGILYDEEKYKPFSQVPTGEVFYYSCEYNFVSPSKSFWTRITCAEEGWSPTPKCLRLCFFPFVENGHSESSGQTHLEGDTVQIICNTGYRLQNNENNISCVERGWSTPPKCRSTISAEKCGPPPPIDNGDITSFLLSVYAPGSSVEYQCQNLYQLEGNNQITCRNGQWSEPPKCLDPCVISQEIMEKYNIKLKWTNQQKLYSRTGDIVEFVCKSGYHPTKSHSFRAMCQNGKLVYPSCEEKXNQWHYY

SEQ ID NO: 878 - protein, 606 aa, Homo Sapiens
  misc_feature (570)..(570): Xaa can be any naturally occurring amino acid
MLLLFSVILISWVSTVGGEGTLCDFPKIHHGFLYDEEDYNPFSQVPTGEVFYYSCEYNFVSPSKSFWTRITCTEEGWSPTPKCLRMCSFPFVKNGHSESSGLIHLEGDTVQIICNTGYSLQNNEKNISCVERGWSTPPICSFTKGECHVPILEANVDAQPKKESYKVGDVLKFSCRKNLIRVGSDSVQCYQFGWSPNFPTCKGQVRSCGPPPQLSNGEVKEIRKEEYGHNEVVEYDCNPNFIINGPKKIQCVDGEWTTLPTCVEQVKTCGYIPELEYGYVQPSVPPYQHGVSVEVNCRNEYAMIGNNMITCINGIWTELPMCVATHQLKRCKIAGVNIKTLLKLSGKEFNHNSRIRYRCSDIFRYRHSVCINGKWNPEVDCTEKREQFCPPPPQIPNAQNMTTTVNYQDGEKVAVLCKENYLLPEAKEIVCKDGRWQSLPRCVESTAYCGPPPSINNGDTTSFPLSVYPPGSTVTYRCQSFYKLQGSVTVTCRNKQWSEPPRCLDPCVVSEENMNKNNIQLKWRNDGKLYAKTGDAVEFQCKFPHKAMISSPPFRAICQEGKFEYPICEXSKHNFPEYILQTSIYAKSSHYVANSVVTSFILSGVV

SEQ ID NO: 879 - protein, 607 aa, Homo Sapiens
  misc_feature (584)..(584): Xaa can be any naturally occurring amino acid
MKLLHVFLLFLCFHLRFCKVTYTSQEDLVEKKCLAKKYTHLSCDKVFCQPWQRCIEGTCVCKLPYQCPKNGTAVCATNRRSFPTYCQQKSLECLHPGTKFLNNGTCTAEGKFSVSLKHGNTDSEGIVEVKLVDQDKTMFICKSSWSMREANVACLDLGFQQGADTQRRFKLSDLSINSTECLHVHCRGLETSLAECTFTKRRTMGYQDFADVVCYTQKADSPMDDFFQCVNGKYISQMKACDGINDCGDQSDELCCKACQGKGFHCKSGVCIPSQYQCNGEVDCITGEDEVGCAGFASVAQEETEILTADMDAERRRIKSLLPKLSCGVKNRMHIRRKRIVGGKRAQLGDLPWQVAIKDASGITCGGIYIGGCWILTAAHCLRASKTHRYQIWTTVVDWIHPDLKRIVIEYVDRIIFHENYNAGTYQNDIALIEMKKDGNKKDCELPRSIPACVPWSPYLFQPNDTCIVSGWGREKDNERVFSLQWGEVKLISNCSKFYGNRFYEKEMECAGTYDGSIDACKGDSGGPLVCMDANNVTYVWGVVSWGENCGKPEFPGVYTKVANYFDWISYHVGRPFISQYNVXNCDLSLHSILFLSRVPFNGNKTV

SEQ ID NO: 880 - protein, 238 aa, Homo Sapiens
  misc_feature (167)..(167): Xaa can be any naturally occurring amino acid
MASGVAVSDGVIKVFNDMKVRKSSTPEEVKKRKKAVLFCLSEDKKNIILEEGKEILVGDVGQTVDDPYATFVKMLPDKDCRYALYDATYETKESKKEDLVFIFWAPESAPLKSKMIYASSKDAIKKKLTGIKHELQANCYEEVKDRCTLAEKLGGSAVISLEGKPLXAPSGPLPGASGSPTPALGGCRLPPSCQTGGAGGIPAGGGQSLHPSCQTDPPPPGFSFSLHPLTVLAFPNCF

SEQ ID NO: 881 - protein, 1858 aa, Homo Sapiens
  misc_feature (1829)..(1829): Xaa can be any naturally occurring amino acid
MMRNKDKSQEEDSSLHSNASSHSASEEASGSDSGSQSESEQGSDPGSGHGSESNSSSESSESQSESESESAGSKSQPVLPEAKEKPASKKERIADVKKMWEEYPDVYGVRRSNRSRQEPSRFNIKEEASSGSESGSPKRRGQRQLKKQEKWKQEPSEDEQEQGTSAESEPEQKKVKARRPVPRRTVPKPRVKKQPKTQRGKRKKQDSSDEDDDDDEAPKRQTRRRAAKNVSYKEDDDFETDSDDLIEMTGEGVDEQQDNSETIEKVLDSRLGKKGATGASTTVYAIEANGDPSGDFDTEKDEGEIQYLIKWKGWSYIHSTWESEESLQQQKVKGLKKLENFKKKEDEIKQWLGKVSPEDVEYFNCQQELASELNKQYQIVERVIAVKTSKSTLGQTDFPAHSRKPAPSNEPEYLCKWMGLPYSECSWEDEALIGKKFQNCIDSFHSRNNSKTIPTRECKALKQRPRFVALKKQPAYLGGENLELRDYQLEGLNWLAHSWCKNNSVILADEMGLGKTIQTISFLSYLFHQHQLYGPFLIVVPLSTLTSWQREFEIWAPEINVVVYIGDLMSRNTIREYEWIHSQTKRLKFNALITTYEILLKDKTVLGSINWAFLGVDEAHRLKNDDSLLYKTLIDFKSNHRLLITGTPLQNSLKELWSLLHFIMPEKFEFWEDFEEDHGKGRENGYQSLHKVLEPFLLRRVKKDVEKSLPAKVEQILRVEMSALQKQYYKWILTRNYKALAKGTRGSTSGFLNIVMELKKCCNHCYLIKPPEENERENGQEILLSLIRSSGKLILLDKLLTRLRERGNRVLIFSQMVRMLDILAEYLTIKHYPFQRLDGSIKGEIRKQALDHFNADGSEDFCFLLSTRAGGLGINLASADTVVIFDSDWNPQNDLQAQARAHRIGQKKQVNIYRLVTKGTVEEEIIERAKKKMVLDHLVIQRMDTTGRTILENNSGRSNSNPFNKEELTAILKFGAEDLFKELEGEESEPQEMDIDEILRLAETRENEVSTSATDELLSQFKVANFATMEDEEELEERPHKDWDEIIPEEQRKKVEEEERQKELEEIYMLPRIRSSTKKAQTNDSDSDTESKRQAQRSSASESETEDSDDDKKPKRRGRPRSVRKDLVEGFTDAEIRRFIKAYKKFGLPLERLECIARDAELVDKSVADLKRLGELIHNSCVSAMQEYEEQLKENASEGKGPGKRRGPTIKISGVQVNVKSIIQHEEEFEMLHKSIPVDPEEKKKYCLTCRVKAAHFDVEWGVEDDSRLLLGIYEHGYGNWELIKTDPELKLTDKILPVETDKKPQGKQLQTRADYLLKLLRKGLEKKGAVTGGEEAKLKKRKPRVKKENKVPRLKEEHGIELSSPRHSDNPSEEGEVKDDGLEKSPMKKKQKKKENKENKEKQMSSRKDKEGDKERKKSKDKKEKPKSGDAKSSSKSKRSQGPVHITAGSEPVPIGEDEDDDLDQETFSICKERMRPVKKALKQLDKPDKGLNVQEQLEHTRNCLLKIGDRIAECLKAYSDQEHIKLWRRNLWIFVSKFTEFDARKLHKLYKMAHKKRSQEEEEQKKKDDVTGGKKPFRPEASGSSRDSLISQSHTSHNLHPQKPHLPASHGPQMHGHPRDNYNHPNKRHFSNADRGDWQRERKFNYGGGNNNPPWGSDRHHQYEQHWYKDHHYGDRRHMDAHRSGSYRPNNMSRKRPYDQYSSDRDHRGHRDYYDRHHHDSKRRRSDEFRPQNYHQQDFRRMSDHRPAMGYHGQGPSDHYRSFHTDKLGEYKQPLPPLHPAVSDPRSPPSQKSPHDSKSPLDHRSPLERSLEQKNNPDYNWNVRKTXRTARKGESKSHQTRGYFWSDPTVAGYLDQ

SEQ ID NO: 882 - protein, 700 aa, Homo Sapiens
  misc_feature (678)..(678): Xaa can be any naturally occurring amino acid
MQPTLLLSLLGAVGLAAVNSMPVDNRNHNEGMVTRCIIEVLSNALSKSSAPPITPECRQVLKTSRKDVKDKETTENENTKFEVRLLRDPADASEAHESSSRGEAGAPGEEDIQGPTKADTEKWAEGGGHSRERADEPQWSLYPSDSQVSEEVKTRHSEKSQREDEEEEEGENYQKGERGEDSSEEKHLEEPGETQNAFLNERKQASAIKKEELVARSETHAAGHSQEKTHSREKSSQESGEEAGSQENHPQESKGQPRSQEESEEGEEDATSEVDKRRTRPRHHHGRSRPDRSSQGGSLPSEEKGHPQEESEESNVSMASLGEKRDHHSTHYRASEEEPEYGEEIKGYPGVQAPEDLEWERYRGRGSEEYRAPRPQSEESWDEEDKRNYPSLELDKMAHGYGEESEEERGLEPGKGRHHRGRGGEPRAYFMSDTREEKRFLGEGHHRVQENQMDKARRHPQGAWKELDRNYLNYGEEGAPGKWQQQGDLQDTKENREEARFQDKQYSSHHTAEKRKRLGELFNPYYDPLQWKSSHFERRDNMNDNFLEGEEENELTLNEKNFFPEYNYDWWEKKPFSEDVNWGYEKRNLARVPKLDLKRQYDRVAQLDQLLHYRKKSAEFPDFYDSEEPVSTHQEAENEKDRADQTVLTEDEKKELENLAAMDLELQKIAEKFSQRGXLSLERWALLRSSHHMICFSPLH

SEQ ID NO: 883 - protein, 207 aa, Homo Sapiens
  misc_feature (196)..(196): Xaa can be any naturally occurring amino acid
MGSRASTLLRDEELEEIKKETGFSHSQITRLYSRFTSLDKGENGTLSREDFQRIPELAINPLGDRIINAFFPEGEDQVNFRGFMRTLAHFRPIEDNEKSKDVNGPEPLNSRSNKLHFAFRLYDLDKDEKISRDELLQVLRMMVGVNISDEQLGSIADRTIQEADQDGDSAISFTEFVKVLEKVDVEQKMSIRFLHXRRPNCSLRSSI

SEQ ID NO: 884 - protein, 1165 aa, Homo Sapiens
  misc_feature (1131)..(1131): Xaa can be any naturally occurring amino acid
MRCLAPRPAGSYLSEPQGSSQCATMELGPLEGGYLELLNSDADPLCLYHFYDQMDLAGEEEIELYSEPDTDTINCDQFSRLLCDMEGDEETREAYANIAELDQYVFQDSQLEGLSKDIFKHIGPDEVIGESMEMPAEVGQKSQKRPFPEELPADLKHWKPAEPPTVVTGSLLVGPVSDCSTLPCLPLPALFNQEPASGQMRLEKTDQIPMPFSSSSLSCLNLPEGPIQFVPTISTLPHGLWQISEAGTGVSSIFIYHGEVPQASQVPPPSGFTVHGLPTSPDRPGSTSPFAPSATDLPSMPEPALTSRANMTEHKTSPTQCPAAGEVSNKLPKWPEPVEQFYRSLQDTYGAEPAGPDGILVEVDLVQARLERSSSKSLERELATPDWAERQLAQGGLAEVLLAAKEHRRPRETRVIAVLGKAGQGKSYWAGAVSRAWACGRLPQYDFVFSVPCHCLNRPGDAYGLQDLLFSLGPQPLVAADEVFSHILKRPDRVLLILDGFEELEAQDGFLHSTCGPAPAEPCSLRGLLAGLFQKKLLRGCTLLLTARPRGRLVQSLSKADALFELSGFSMEQAQAYVMRYFESSGMTEHQDRALTLLRDRPLLLSHSHSPTLCRAVCQLSEALLELGEDAKLPSTLTGLYVGLLGRAALDSPPGALAELAKLAWELGRRHQSTLQEDQFPSADVRTWAMAKGLVQHPPRAAESELAFPSFLLQCFLGALWLALSGEIKDKELPQYLALTPRKKRPYDNWLEGVPRFLAGLIFQPPARCLGALLGPSAAASVDRKQKVLARYLKRLQPGTLRARQLLELLHCAHEAEEAGIWQHVVQELPGRLSFLGTRLTPPDAHVLGKALEAAGQDFSLDLRSTGICPSGLGSLVGLSCVTRFRAALSDTVALWESLQQHGETKLLQAAEEKFTIEPFKAKSLKDVEDLGKLVQTQRTRSSSEDTAGELPAVRDLKKLEFALGPVSGPQAFPKLVRILTAFSSLQHLDLDALSENKIGDEGVSQLSATFPQLKSLETLNLSQNNITDLGAYKLAEALPSLAASLLRLSLYNNCICDVGAESLARVLPDMVSLRVMDVQYNKFTAAGAQQLAASLRRCPHVETLAMWTPTIPFSVQEHLQQQDSRISLRXSQLCSGQACSLRTLTTLDLELGTCGHSSSPGCIP

SEQ ID NO: 885 - protein, 468 aa, Homo Sapiens
  misc_feature (382)..(382): Xaa can be any naturally occurring amino acid
MPFGNTHNKFKLNYKPEEEYPDLSKHNNHMAKVLTLELYKKLRDKETPSGFTVDDVIQTGVDNPGHPFIMTVGCVAGDEESYEVFKELFDPIISDRHGGYKPTDKHKTDLNHENLKGGDDLDPNYVLSSRVRTGRSIKGYTLPPHCSRGERRAVEKLSVEALNSLTGEFKGKYYPLKSMTEKEQQQLIDDHFLFDKPVSPLLLASGMARDWPDARGIWHNDNKSFLVWVNEEDHLRVISMEKGGNMKEVFRRFCVGLQKIEEIFKKAGHPFMWNQHLGYVLTCPSNLGTGLRGGVHVKLAHLSKHPKFEEILTRLRLQKRGTGGVDTAAVGSVFDVSNADRLGSSEVEQVQLVVDGVKLMVEMEKKLEKGQSIDDMIPAQKXAPAHLPPTAGTQPVGGPGPPESCSLTPRPAPCPRVPPGGSLHPSQSSSFNQSSNQWAPSSGFWPMKYLPGRVLFFSQSSTPTRSSS

SEQ ID NO: 886 - protein, 693 aa, Homo Sapiens
  misc_feature (688)..(688): Xaa can be any naturally occurring amino acid
MEELVGLREGFSGDPVTLQELWGPCPHIRRAIQGGLEWLKQKVFRLGEDWYFLMTLGVLMALVSYAMNFAIGCVVRAHQWLYREIGDSHLLRYLSWTVYPVALVSFSSGFSQSITPSSGGSGIPELKTMLAGVILEDYLDIKNFGAKVVGLSCTLATGSTLFLGKVGPFVHLSVMIAAYLGRVRTTTIGEPENKSKQNEMLVAAAAVGVATVFAAPFSGVLFSIEVMSSHFSVRDYWRGFFAATCGAFIFRLLAVFNSEQETITSLYKTSFRVDVPFDLPEIFFFVALGGICGVLSCAYLFCQRTFLSFIKTNRYSSKLLATSKPVYSALATLLLASITYPPGVGHFLASRLSMKQHLDSLFDNHSWALMTQNSSPPWPEELDPQHLWWEWYHPRFTIFGTLAFFLVMKFWMLILATTIPMPAGYFMPIFILGAAIGRLLGEALAVAFPEGIVTGGVTNPIMPGGYALAGAAAFSGAVTHTISTALLAFELTGQIVHALPVLMAVLAANAIAQSCQPSFYDGTIIVKKLPYLPRILGRNIGSHHVRVEHFMNHSITTLAKDTPLEEVVKVVTSTDVTEYPLVESTESQILVGIVQRAQLVQALQAEPPSRAPGHQQCLQDILARGCPTEPVTLTLFSETTLHQAQNLFKLLNLQSLFVTSRGRAVGCVSWVEMKKAISNLTNPPAPKXAGPAR

SEQ ID NO: 887 - protein, 619 aa, Homo Sapiens
  misc_feature (548)..(548): Xaa can be any naturally occurring amino acid
MTKTDPAPMAPPPRGEEEEEEEEDEPVPEAPSPTQERRQKPVVHPSAPAPLPKDYAFTFFDPNDPACQEILFDPQTTIPELFAIVRQWVPQVQHKIDVIGNEILRRGCHVNDRDGLTDMTLLHYACKAGAHGVGDPAAAVRLSQQLLALGADVTLRSRWTNMNALHYAAYFDVPDLVRVLLKGARPRVVNSTCSDFNHGSALHIAASSLCLGAAKCLLEHGANPALRNRKGQVPAEVVPDPMDMSLDKAEAALVAKELRTLLEEAVPLSCALPKVTLPNYDNVPGNLMLSALGLRLGDRVLLDGQKTGTLRFCGTTEFASGQWVGVELDEPEGKNDGSVGGVRYFICPPKQGLFASVSKISKAVDAPPSSVTSTPRTPRMDFSRVTGKGRREHKGKKKTPSSPSLGSLQQRDGAKAEVGDQVLVAGQKQGIVRFYGKTDFAPGYWYGIELDQPTGKHDGSVFGVRYFTCPPRHGVFAPASRIQRIGGSTDSPGDSVGAKKVHQVTMTQPKRTFTTVRTPKDIASENSISRLLFCCWFPWMLRAEMQSXRPWTPDKETESPLASPDTRGALSHPEIEIPSNTSRVETPVSQPSIIEAPLLTDTPIITPKYRPHVTQKEIP

SEQ ID NO: 888 - protein, 516 aa, Homo Sapiens
  misc_feature (508)..(508): Xaa can be any naturally occurring amino acid
MDPKLGRMAASLLAVLLLLLERGMFSSPSPPPALLEKVFQYIDLHQDEFVQTLKEWVAIESDSVQPVPRFRQELFRMMAVAADTLQRLGARVASVDMGPQQLPDGQSLPIPPVILAELGSDPTKGTVCFYGHLDVQPADRGDGWLTDPYVLTEVDGKLYGRGATDNKGPVLAWINAVSAFRALEQDLPVNIKFIIEGMEEAGSVALEELVEKEKDRFFSGVDYIVISDNLWISQRKPAITYGTRGNSYFMVEVKCRDQDFHSGTFGGILHEPMADLVALLGSLVDSSGHILVPGIYDEVVPLTEEEINTYKAIHLDLEEYRNSSRVEKFLFDTKEEILMHLWRYPSLSIHGIEGAFDEPGTKTVIPGRVIGKFSIRLVPHMNVSAVEKQVTRHLEDVFSKRNSSNKMVVSMTLGLHPWIANIDDTQYLAAKRAIRTVFGTEPDMIRDGSTIPIAKMFQEIVHKSVVLIPLGAVDDGEHSQNEKINRWNYIEGTKLFAAFFLEMAQLHXSQEPSSLI

SEQ ID NO: 889 - protein, 1063 aa, Homo Sapiens
  misc_feature (1019)..(1019): Xaa can be any naturally occurring amino acid
MKMWLLVSHLVIISITTCLAEFTWYRRYGHGVSEEDKGFGPIFEEQPINTIYPEESLEGKVSLNCRARASPFPVYKWRMNNGDVDLTSDRYSMVGGNLVINNPDKQKDAGIYYCLASNNYGMVRSTEATLSFGYLDPFPPEERPEVRVKEGKGMVLLCDPPYHFPDDLSYRWLLNEFPVFITMDKRRFVSQTNGNLYIANVEASDKGNYSCFVSSPSITKSVFSKFIPLIPIPERTTKPYPADIVVQFKDVYALMGQNVTLECFALGNPVPDIRWRKVLEPMPSTAEISTSGAVLKIFNIQLEDEGIYECEAENIRGKDKHQARIYVQAFPEWVEHINDTEVDIGSDLYWPCVATGKPIPTIRWLKNGYAYHKGELRLYDVTFENAGMYQCIAENTYGAIYANAELKILALAPTFEMNPMKKKILAAKGGRVIIECKPKAAPKPKFSWSKGTEWLVNSSRILIWEDGSLEINNITRNDGGIYTCFAENNRGKANSTGTLVITDPTRIILAPINADITVGENATMQCAASFDPALDLTFVWSFNGYVIDFNKENIHYQRNFMLDSNGELLIRNAQLKHAGRYTCTAQTIVDNSSASADLVVRGPPGPPGGLRIEDIRATSVALTWSRGSDNHSPISKYTIQTKTILSDDWKDAKTDPPIIEGNMEAARAVDLIPWMEYEFRVVATNTLGRGEPSIPSNRIKTDGAAPNVAPSDVGGGGGRNRELTITWAPLSREYHYGNNFGYIVAFKPFDGEEWKKVTVTNPDTGRYVHKDETMSPSTAFQVKVKAFNNKGDGPYSLVAVINSAQDAPSEAPTEVGVKVLSSSEISVHWEHVLEKIVESYQIRYWAAHDKEEAANRVQVTSQEYSARLENLLPDTQYFIEVGACNSAGCGPPSDMIEAFTKKAPPSQPPRIISSVRSGSRYIITWDHVVALSNESTVTGYKVLYRPDGQHDGKLYSTHKHSIEVPIPRDGEYVVEVRAHSDGGDGVVSQVKISGAPTLSPSLLGLLLPAFGILVYLEFXMCCDSCCSHPSSEDTLQPWDDHNSFQFLRLHPKPNKLYFNKLFN

SEQ ID NO: 890 - protein, 1052 aa, Homo Sapiens
  misc_feature (1008)..(1008): Xaa can be any naturally occurring amino acid
MKMWLLVSHLVIISITTCLAVSEEDKGFGPIFEEQPINTIYPEESLEGKVSLNCRARASPFPVYKWRMNNGDVDLTSDRYSMVGGNLVINNPDKQKDAGIYYCLASNNYGMVRSTEATLSFGYLDPFPPEERPEVRVKEGKGMVLLCDPPYHFPDDLSYRWLLNEFPVFITMDKRRFVSQTNGNLYIANVEASDKGNYSCFVSSPSITKSVFSKFIPLIPIPERTTKPYPADIVVQFKDVYALMGQNVTLECFALGNPVPDIRWRKVLEPMPSTAEISTSGAVLKIFNIQLEDEGIYECEAENIRGKDKHQARIYVQAFPEWVEHINDTEVDIGSDLYWPCVATGKPIPTIRWLKNGYAYHKGELRLYDVTFENAGMYQCIAENTYGAIYANAELKILALAPTFEMNPMKKKILAAKGGRVIIECKPKAAPKPKFSWSKGTEWLVNSSRILIWEDGSLEINNITRNDGGIYTCFAENNRGKANSTGTLVITDPTRIILAPINADITVGENATMQCAASFDPALDLTFVWSFNGYVIDFNKENIHYQRNFMLDSNGELLIRNAQLKHAGRYTCTAQTIVDNSSASADLVVRGPPGPPGGLRIEDIRATSVALTWSRGSDNHSPISKYTIQTKTILSDDWKDAKTDPPIIEGNMEAARAVDLIPWMEYEFRVVATNTLGRGEPSIPSNRIKTDGAAPNVAPSDVGGGGGRNRELTITWAPLSREYHYGNNFGYIVAFKPFDGEEWKKVTVTNPDTGRYVHKDETMSPSTAFQVKVKAFNNKGDGPYSLVAVINSAQDAPSEAPTEVGVKVLSSSEISVHWEHVLEKIVESYQIRYWAAHDKEEAANRVQVTSQEYSARLENLLPDTQYFIEVGACNSAGCGPPSDMIEAFTKKAPPSQPPRIISSVRSGSRYIITWDHVVALSNESTVTGYKVLYRPDGQHDGKLYSTHKHSIEVPIPRDGEYVVEVRAHSDGGDGVVSQVKISGAPTLSPSLLGLLLPAFGILVYLEFXMCCDSCCSHPSSEDTLQPWDDHNSFQFLRLHPKPNKLYFNKLFN

SEQ ID NO: 891 - protein, 687 aa, Homo Sapiens
  misc_feature (681)..(681): Xaa can be any naturally occurring amino acid
MLPQIPFLLLVSLNLVHGVFYAERYQMPTGIKGPLPNTKTQFFIPYTIKSKGIAVRGEQGTPGPPGPAGPRGHPGPSGPPGKPGYGSPGLQGEPGLPGPPGPSAVGKPGVPGLPGKPGERGPYGPKGDVGPAGLPGPRGPPGPPGIPGPAGISVPGKPGQQGPTGAPGPRGFPGEKGAPGVPGMNGQKGEMGYGAPGRPGERGLPGPQGPTGPSGPPGVGKRGENGVPGQPGIKGDRGFPGEMGPIGPPGPQGPPGERGPEGIGKPGAAGAPGQPGIPGTKGLPGAPGIAGPPGPPGFGKPGLPGLKGERGPAGLPGGPGAKGEQGPAGLPGKPGLTGPPGNMGPQGPKGIPGSHGLPGPKGETGPAGPAGYPGAKGERGSPGSDGKPGYPGKPGLDGPKGNPGLPGPKGDPGVGGPPGLPGPVGPAGAKGMPGHNGEAGPRGAPGIPGTRGPIGPPGIPGFPGSKGDPGSPGPPGPAGIATKGLNGPTGPPGPPGPRGHSGEPGLPGPPGPPGPPGQAVMPEGFIKAGQRPSLSGTPLVSANQGVTGMPVSAFTVILSKAYPAIGTPIPFDKILYNRQQHYDPRTGIFTCQIPGIYYFSYHVHVKGTHVWVGLYKNGTPVMYTYDEYTKGYLDQASGSAIIDLTENDQVWLQLPNAESNGLYSSEYVHSSFSGFLVAPMXVHTELI

SEQ ID NO: 892 - protein, 1521 aa, Homo Sapiens
  misc_feature (1488)..(1488): Xaa can be any naturally occurring amino acid
MIRLGAPQTLVLLTLLVAAVLRCQGQDVQEAGSCVQDGQRYNDKDVWKPEPCRICVCDTGTVLCDDIICEDVKDCLSPEIPFGECCPICPTDLATASGQPGPKGQKGEPGDIKDIVGPKGPPGPQGPAGEQGPRGDRGDKGEKGAPGPRGRDGEPGTPGNPGPPGPPGPPGPPGLGGNFAAQMAGGFDEKAGGAQLGVMQGPMGPMGPRGPPGPAGAPGPQGFQGNPGEPGEPGVSGPMGPRGPPGPPGKPGDDGEAGKPGKAGERGPPGPQGARGFPGTPGLPGVKGHRGYPGLDGAKGEAGAPGVKGESGSPGENGSPGPMGPRGLPGERGRTGPAGAAGARGNDGQPGPAGPPGPVGPAGGPGFPGAPGAKGEAGPTGARGPEGAQGPRGEPGTPGSPGPAGASGNPGTDGIPGAKGSAGAPGIAGAPGFPGPRGPPGPQGATGPLGPKGQTGEPGIAGFKGEQGPKGEPGPAGPQGAPGPAGEEGKRGARGEPGGVGPIGPPGERGAPGNRGFPGQDGLAGPKGAPGERGPSGLAGPKGANGDPGRPGEPGLPGARGLTGRPGDAGPQGKVGPSGAPGEDGRPGPPGPQGARGQPGVMGFPGPKGANGEPGKAGEKGLPGAPGLRGLPGKDGETGAAGPPGPAGPAGERGEQGAPGPSGFQGLPGPPGPPGEGGKPGDQGVPGEAGAPGLVGPRGERGFPGERGSPGAQGLQGPRGLPGTPGTDGPKGASGPAGPPGAQGPPGLQGMPGERGAAGIAGPKGDRGDVGEKGPEGAPGKDGGRGLTGPIGPPGPAGANGEKGEVGPPGPAGSAGARGAPGERGETGPPGPAGFAGPPGADGQPGAKGEQGEAGQKGDAGAPGPQGPSGAPGPQGPTGVTGPKGARGAQGPPGATGFPGAAGRVGPPGSNGNPGPPGPPGPSGKDGPKGARGDSGPPGRAGEPGLQGPAGPPGEKGEPGDDGPSGAEGPPGPQGLAGQRGIVGLPGQRGERGFPGLPGPSGEPGKQGAPGASGDRGPPGPVGPPGLTGPAGEPGREGSPGADGPPGRDGAAGVKGDRGETGAVGAPGAPGPPGSPGPAGPTGKQGDRGEAGAQGPMGPSGPAGARGIQGPQGPRGDKGEAGEPGERGLKGHRGFTGLQGLPGPPGPSGDQGASGPAGPSGPRGPPGPVGPSGKDGANGIPGPIGPPGPRGRSGETGPAGPPGNPGPPGPPGPPGPGIDMSAFAGLGPREKGPDPLQYMRADQAAGGLRQHDAEVDATLKSLNNQIESIRSPEGSRKNPARTCRDLKLCHPEWKSGDYWIDPNQGCTLDAMKVFCNMETGETCVYPNPANVPKKNWWSSKSKEKKHIWFGETINGGFHFSYGDDNLAPNTANVQMTFLRLLSTEGSQNITYHCKNSIAYLDEAAGNLKKALLIQGSNDVEIRAEGNSRFTYTALKDGCTKHTGKWGKTVIEYRSQKTSRLPIIDIAPMDIGGPEQEFGVDIGPVCFLXKPEPRNNTIRCKPKGPKYFPISVTLGLCTEWLT

SEQ ID NO: 893 - protein, 1511 aa, Homo Sapiens
  misc_feature (1467)..(1467): Xaa can be any naturally occurring amino acid
MMSFVQKGSWLLLALLHPTIILAQQEAVEGGCSHLGQSYADRDVWKPEPCQICVCDSGSVLCDDIICDDQELDCPNPEIPFGECCAVCPQPPTAPTRPPNGQGPQGPKGDPGPPGIPGRNGDPGIPGQPGSPGSPGPPGICESCPTGPQNYSPQYDSYDVKSGVAVGGLAGYPGPAGPPGPPGPPGTSGHPGSPGSPGYQGPPGEPGQAGPSGPPGPPGAIGPSGPAGKDGESGRPGRPGERGLPGPPGIKGPAGIPGFPGMKGHRGFDGRNGEKGETGAPGLKGENGLPGENGAPGPMGPRGAPGERGRPGLPGAAGARGNDGARGSDGQPGPPGPPGTAGFPGSPGAKGEVGPAGSPGSNGAPGQRGEPGPQGHAGAQGPPGPPGINGSPGGKGEMGPAGIPGAPGLMGARGPPGPAGANGAPGLRGGAGEPGKNGAKGEPGPRGERGEAGIPGVPGAKGEDGKDGSPGEPGANGLPGAAGERGAPGFRGPAGPNGIPGEKGPAGERGAPGPAGPRGAAGEPGRDGVPGGPGMRGMPGSPGGPGSDGKPGPPGSQGESGRPGPPGPSGPRGQPGVMGFPGPKGNDGAPGKNGERGGPGGPGPQGPPGKNGETGPQGPPGPTGPGGDKGDTGPPGPQGLQGLPGTGGPPGENGKPGEPGPKGDAGAPGAPGGKGDAGAPGERGPPGLAGAPGLRGGAGPPGPEGGKGAAGPPGPPGAAGTPGLQGMPGERGGLGSPGPKGDKGEPGGPGADGVPGKDGPRGPTGPIGPPGPAGQPGDKGEGGAPGLPGIAGPRGSPGERGETGPPGPAGFPGAPGQNGEPGGKGERGAPGEKGEGGPPGVAGPPGGSGPAGPPGPQGVKGERGSPGGPGAAGFPGARGLPGPPGSNGNPGPPGPSGSPGKDGPPGPAGNTGAPGSPGVSGPKGDAGQPGEKGSPGAQGPPGAPGPLGIAGITGARGLAGPPGMPGPRGSPGPQGVKGESGKPGANGLSGERGPPGPQGLPGLAGTAGEPGRDGNPGSDGLPGRDGSPGGKGDRGENGSPGAPGAPGHPGPPGPVGPAGKSGDRGESGPAGPAGAPGPAGSRGAPGPQGPRGDKGETGERGAAGIKGHRGFPGNPGAPGSPGPAGQQGAIGSPGPAGPRGPVGPSGPPGKDGTSGHPGPIGPPGPRGNRGERGSEGSPGHPGQPGPPGPPGAPGPCCGGVGAAAIAGIGGEKAGGFAPYYGDEPMDFKINTDEIMTSLKSVNGQIESLISPDGSRKNPARNCRDLKFCHPELKSGEYWVDPNQGCKLDAIKVFCNMETGETCISANPLNVPRKHWWTDSSAEKKHVWFGESMDGGFQFSYGNPELPEDVLDVQLAFLRLLSSRASQNITYHCKNSIAYMDQASGNVKKALKLMGSNEGEFKAEGNSKFTYTVLEDGCTKHTGEWSKTVFEYRTRKAVRLPIVDIAPYDIGGPDQEFGVDVGPVCFLXTKLYLKSQQKKFNSICVPLVLILSTSASDRQNSSYLFPKCLETV

SEQ ID NO: 894 - protein, 1907 aa, Homo Sapiens
  misc_feature (1839)..(1839): Xaa can be any naturally occurring amino acid
MDVHTRWKARSALRPGAPLLPPLLLLLLWAPPPSRAAQPADLLKVLDFHNLPDGITKTTGFCATRRSSKGPDVAYRVTKDAQLSAPTKQLYPASAFPEDFSILTTVKAKKGSQAFLVSIYNEQGIQQIGLELGRSPVFLYEDHTGKPGPEDYPLFRGINLSDGKWHRIALSVHKKNVTLILDCKKKTTKFLDRSDHPMIDINGIIVFGTRILDEEVFEGDIQQLLFVSDHRAAYDYCEHYSPDCDTAVPDTPQSQDPNPDEYYTEGDGEGETYYYEYPYYEDPEDLGKEPTPSKKPVEAAKETTEVPEELTPTPTEAAPMPETSEGAGKEEDVGIGDYDYVPSEDYYTPSPYDDLTYGEGEENPDQPTDPGAGAEIPTSTADTSNSSNPAPPPGEGADDLEGEFTEETIRNLDENYYDPYYDPTSSPSEIGPGMPANQDTIYEGIGGPRGEKGQKGEPAIIEPGMLIEGPPGPEGPAGLPGPPGTMGPTGQVGDPGERGPPGRPGLPGADGLPGPPGTMLMLPFRFGGGGDAGSKGPMVSAQESQAQAILQQARLALRGPAGPMGLTGRPGPVGPPGSGGLKGEPGDVGPQGPRGVQGPPGPAGKPGRRGRAGSDGARGMPGQTGPKGDRGFDGLAGLPGEKGHRGDPGPSGPPGPPGDDGERGDDGEVGPRGLPGEPGPRGLLGPKGPPGPPGPPGVTGMDGQPGPKGNVGPQGEPGPPGQQGNPGAQGLPGPQGAIGPPGEKGPLGKPGLPGMPGADGPPGHPGKEGPPGEKGGQGPPGPQGPIGYPGPRGVKGADGIRGLKGTKGEKGEDGFPGFKGDMGIKGDRGEIGPPGPRGEDGPEGPKGRGGPNGDPGPLGPPGEKGKLGVPGLPGYPGRQGPKGSIGFPGFPGANGEKGGRGTPGKPGPRGQRGPTGPRGERGPRGITGKPGPKGNSGGDGPAGPPGERGPNGPQGPTGFPGPKGPPGPPGKDGLPGHPGQRGETGFQGKTGPPGPPGVVGPQGPTGETGPMGERGHPGPPGPPGEQGLPGLAGKEGTKGDPGPAGLPGKDGPPGLRGFPGDRGLPGPVGALGLKGNEGPPGPPGPAGSPGERGPAGAAGPIGIPGRPGPQGPPGPAGEKGAPGEKGPQGPAGRDGLQGPVGLPGPAGPVGPPGEDGDKGEIGEPGQKGSKGDKGEQGPPGPTGPQGPIGQPGPSGADGEPGPRGQQGLFGQKGDEGPRGFPGPPGPVGLQGLPGPPGEKGETGDVGQMGPPGPPGPRGPSGAPGADGPQGPPGGIGNPGAVGEKGEPGEAGEPGLPGEGGPPGPKGERGEKGESGPSGAAGPPGPKGPPGDDGPKGSPGPVGFPGDPGPPGEPGPAGQDGPPGDKGDDGEPGQTGSPGPTGEPGPSGPPGKRGPPGPAGPEGRQGEKGAKGEAGLEGPPGKTGPIGPQGAPGKPGPDGLRGIPGPVGEQGLPGSPGPDGPPGPMGPPGLPGLKGDSGPKGEKGHPGLIGLIGPPGEQGEKGDRGLPGPQGSSGPKGEQGITGPSGPIGPPGPPGLPGPPGPKGAKGSSGPTGPKGEAGHPGPPGPPGPPGEVIQPLPIQASRTRRNIDASQLLDDGNGENYVDYADGMEEIFGSLNSLKLEIEQMKRPLGTQQNPARTCKDLQLCHPDFPDGEYWVDPNQGCSRDSFKVYCNFTAGGSTCVFPDKKSEGARITSWPKENPGSWFSEFKRGKLLSYVDAEGNPVGVVQMTFLRLLSASAHQNVTYHCYQSVAWQDAATGSYDKALRFLGSNDEEMSYDNNPYIRALVDGCATKKGYQKTVLEIDTPKVEQVPIVDIMFNDFGEASQKFGFEVGPACFMGXEPPSPGSREQPRDLSMPFVRECPVHVLTLDSEGFSLPSHLTSSTPRHHGVWDPSPERTEGRSRAPTWS

SEQ ID NO: 895 - protein, 3200 aa, Homo Sapiens
  misc_feature (3178)..(3178): Xaa can be any naturally occurring amino acid
MRKHRHLPLVAVFCLFLSGFPTTHAQQQQADVKNGAAADIIFLVDSSWTIGEEHFQLVREFLYDVVKSLAVGENDFHFALVQFNGNPHTEFLLNTYRTKQEVLSHISNMSYIGGTNQTGKGLEYIMQSHLTKAAGSRAGDGVPQVIVVLTDGHSKDGLALPSAELKSADVNVFAIGVEDADEGALKEIASEPLNMHMFNLENFTSLHDIVGNLVSCVHSSVSPERAGDTETLKDITAQDSADIIFLIDGSNNTGSVNFAVILDFLVNLLEKLPIGTQQIRVGVVQFSDEPRTMFSLDTYSTKAQVLGAVKALGFAGGELANIGLALDFVVENHFTRAGGSRVEEGVPQVLVLISAGPSSDEIRYGVVALKQASVFSFGLGAQAASRAELQHIATDDNLVFTVPEFRSFGDLQEKLLPYIVGVAQRHIVLKPPTIVTQVIEVNKRDIVFLVDGSSALGLANFNAIRDFIAKVIQRLEIGQDLIQVAVAQYADTVRPEFYFNTHPTKREVITAVRKMKPLDGSALYTGSALDFVRNNLFTSSAGYRAAEGIPKLLVLITGGKSLDEISQPAQELKRSSIMAFAIGNKGADQAELEEIAFDSSLVFIPAEFRAAPLQGMLPGLLAPLRTLSGTPEVHSNKRDIIFLLDGSANVGKTNFPYVRDFVMNLVNSLDIGNDNIRVGLVQFSDTPVTEFSLNTYQTKSDILGHLRQLQLQGGSGLNTGSALSYVYANHFTEAGGSRIREHVPQLLLLLTAGQSEDSYLQAANALTRAGILTFCVGASQANKAELEQIAFNPSLVYLMDDFSSLPALPQQLIQPLTTYVSGGVEEVPLAQPESKRDILFLFDGSANLVGQFPVVRDFLYKIIDELNVKPEGTRIAVAQYSDDVKVESRFDEHQSKPEILNLVKRMKIKTGKALNLGYALDYAQRYIFVKSAGSRIEDGVLQFLVLLVAGRSSDRVDGPASNLKQSGVVPFIFQAKNADPAELEQIVLSPAFILAAESLPKIGDLHPQIVNLLKSVHNGAPAPVSGEKDVVFLLDGSEGVRSGFPLLKEFVQRVVESLDVGQDRVRVAVVQYSDRTRPEFYLNSYMNKQDVVNAVRQLTLLGGPTPNTGAALEFVLRNILVSSAGSRITEGVPQLLIVLTADRSGDDVRNPSVVVKRGGAVPIGIGIGNADITEMQTISFIPDFAVAIPTFRQLGTVQQVISERVTQLTREELSRLQPVLQPLPSPGVGGKRDVVFLIDGSQSAGPEFQYVRTLIERLVDYLDVGFDTTRVAVIQFSDDPKVEFLLNAHSSKDEVQNAVQRLRPKGGRQINVGNALEYVSRNIFKRPLGSRIEEGVPQFLVLISSGKSDDEVDDPAVELKQFGVAPFTIARNADQEELVKISLSPEYVFSVSTFRELPSLEQKLLTPITTLTSEQIQKLLASTRYPPPAVESDAADIVFLIDSSEGVRPDGFAHIRDFVSRIVRRLNIGPSKVRVGVVQFSNDVFPEFYLKTYRSQAPVLDAIRRLRLRGGSPLNTGKALEFVARNLFVKSAGSRIEDGVPQHLVLVLGGKSQDDVSRFAQVIRSSGIVSLGVGDRNIDRTELQTITNDPRLVFTVREFRELPNIEERIMNSFGPSAATPAPPGVDTPPPSRPEKKKADIVFLLDGSINFRRDSFQEVLRFVSEIVDTVYEDGDSIQVGLVQYNSDPTDEFFLKDFSTKRQIIDAINKVVYKGGRHANTKVGLEHLRVNHFVPEAGSRLDQRVPQIAFVITGGKSVEDAQDVSLALTQRGVKVFAVGVRNIDSEEVGKIASNSATAFRVGNVQELSELSEQVLETLHDAMHETLCPGVTDAAKACNLDVILGFDGSRDQNVFVAQKGFESKVDAILNRISQMHRVSCSGGRSPTVRVSVVANTPSGPVEAFDFDEYQPEMLEKFRNMRSQHPYVLTEDTLKVYLNKFRQSSPDSVKVVIHFTDGADGDLADLHRASENLRQEGVRALILVGLERVVNLERLMHLEFGRGFMYDRPLRLNLLDLDYELAEQLDNIAEKACCGVPCKCSGQRGDRGPIGSIGPKGIPGEDGYRGYPGDEGGPGERGPPGVNGTQGFQGCPGQRGVKGSRGFPGEKGEVGEIGLDGLDGEDGDKGLPGSSGEKGNPGRRGDKGPRGEKGERGDVGIRGDPGNPGQDSQERGPKGETGDLGPMGVPGRDGVPGGPGETGKNGGFGRRGPPGAKGNKGGPGQPGFEGEQGTRGAQGPAGPAGPPGLIGEQGISGPRGSGGAAGAPGERGRTGPLGRKGEPGEPGPKGGIGNRGPRGETGDDGRDGVGSEGRRGKKGERGFPGYPGPKGNPGEPGLNGTTGPKGIRGRRGNSGPPGIVGQKGDPGYPGPAGPKGNRGDSIDQCALIQSIKDKCPCCYGPLECPVFPTELAFALDTSEGVNQDTFGRMRDVVLSIVNDLTIAESNCPRGARVAVVTYNNEVTTEIRFADSKRKSVLLDKIKNLQVALTSKQQSLETAMSFVARNTFKRVRNGFLMRKVAVFFSNTPTRASPQLREAVLKLSDAGITPLFLTRQEDRQLINALQINNTAVGHALVLPAGRDLTDFLENVLTCHVCLDICNIDPSCGFGSWRPSFRDRRAAGSDVDIDMAFILDSAETTTLFQFNEMKKYIAYLVRQLDMSPDPKASQHFARVAVVQHAPSESVDNASMPPVKVEFSLTDYGSKEKLVDFLSRGMTQLQGTRALGSAIEYTIENVFESAPNPRDLKIVVLMLTGEVPEQQLEEAQRVILQAKCKGYFFVVLGIGRKVNIKEVYTFASEPNDVFFKLVDKSTELNEEPLMRFGRLLPSFVSSENAFYLSPDIRKQCDWFQGDQPTKNLVKFGHKQVNVPNNVTSSPTSNPVTTTKPVTTTKPVTTTTKPVTTTTKPVTIINQPSVKPAAAKPAPAKPVAAKPVATKMATVRPPVAVKPATAAKPVAAKPAAVRPPAAAAAKPVATKPEVPRPQAAKPAATKPATTKPMVKMSREVQVFEITENSAKLHWERAEPPGPYFYDLTVTSAHDQSLVLKQNLTVTDRVIGGLLAGQTYHVAVVCYLRSQVRATYHGSFSTKKSQPPPPQPARSASSSTINLMVSTEPLALTETDICKLPKDEGTCRDFILKWYYDPNTKSCARFWYGGCGGNENKFGSQKECEKVCAPVLAKPGVISVMGTXAWVANIIYLLKKKESAIANLSL

SEQ ID NO: 896 - protein, 785 aa, Homo Sapiens
  misc_feature (745)..(745): Xaa can be any naturally occurring amino acid
MAVLPGPLQLLGVLLTISLSSIRLIQAGAYYGIKPLPPQIPPQMPPQIPQYQPLGQQVPHMPLAKDGLAMGKEMPHLQYGKEYPHLPQYMKEIQPAPRMGKEAVPKKGKEIPLASLRGEQGPRGEPGPRGPPGPPGLPGHGIPGIKGKPGPQGYPGVGKPGMPGMPGKPGAMGMPGAKGEIGQKGEIGPMGIPGPQGPPGPHGLPGIGKPGGPGLPGQPGPKGDRGPKGLPGPQGLRGPKGDKGFGMPGAPGVKGPPGMHGPPGPVGLPGVGKPGVTGFPGPQGPLGKPGAPGEPGPQGPIGVPGVQGPPGIPGIGKPGQDGIPGQPGFPGGKGEQGLPGLPGPPGLPGIGKPGFPGPKGDRGMGGVPGALGPRGEKGPIGAPGIGGPPGEPGLPGIPGPMGPPGAIGFPGPKGEGGIVGPQGPPGPKGEPGLQGFPGKPGFLGEVGPPGMRGLPGPIGPKGEAGQKGVPGLPGVPGLLGPKGEPGIPGDQGLQGPPGIPGIGGPSGPIGPPGIPGPKGEPGLPGPPGFPGIGKPGVAGLHGPPGKPGALGPQGQPGLPGPPGPPGPPGPPAVMPPTPPPQGEYLPDMGLGIDGVKPPHAYGAKKGKNGGPAYEMPAFTAELTAPFPPVGAPVKFNKLLYNGRQNYNPQTGIFTCEVPGVYYFAYHVHCKGGNVWVALFKNNEPVMYTYDEYKKGFLDQASGSAVLLLRPGDRVFLQMPSEQAAGLYAGQYVHSSFSGYLLYPMXKQKNKKQRKERDFIEENDTPKNPNEKHNCFKTLTQLESYM

SEQ ID NO: 897 - protein, 454 aa, Homo Sapiens
  misc_feature (418)..(418): Xaa can be any naturally occurring amino acid
MLALLVLVTVALASAHHGGEHFEGEKVFRVNVEDENHINIIRELASTTQIDFWKPDSVTQIKPHSTVDFRVKAEDTVTVENVLKQNELQYKVLISNLRNVVEAQFDSRVRATGHSYEKYNKWETIEAWTQQVATENPALISRSVIGTTFEGRAIYLLKVGKAGQNKPAIFMDCGFHAREWISPAFCQWFVREAVRTYGREIQVTELLDKLDFYVLPVLNIDGYIYTWTKSRFWRKTRSTHTGSSCIGTDPNRNFDAGWCEIGASRNPCDETYCGPAAESEKETKALADFIRNKLSSIKAYLTIHSYSQMMIYPYSYAYKLGENNAELNALAKATVKELASLHGTKYTYGPGATTIYPAAGGSDDWAYDQGIRYSFTFELRDTGRYGFLLPESQIRATCEETFLAIKYVASYVLEHLYXLRKLMALFQNSHFSFLFFLEFLFWFAWMFCRSQSFF

SEQ ID NO: 898 - protein, 490 aa, Homo Sapiens
  misc_feature (459)..(459): Xaa can be any naturally occurring amino acid
MSDLLSVFLHLLLLFKLVAPVTFRHHRYDDLVRTLYKVQNECPGITRVYSIGRSVEGRHLYVLEFSDHPGIHEPLEPEVKYVGNMHGNEALGRELMLQLSEFLCEEFRNRNQRIVQLIQDTRIHILPSMNPDGYEVAAAQGPNKPGYLVGRNNANGVDLNRNFPDLNTYIYYNEKYGGPNHHLPLPDNWKSQVEPETRAVIRWMHSFNFVLSANLHGGAVVANYPYDKSFEHRVRGVRRTASTPTPDDKLFQKLAKVYSYAHGWMFQGWNCGDYFPDGITNGASWYSLSKGMQDFNYLHTNCFEITLELSCDKFPPEEELQREWLGNREALIQFLEQVHQGIKGMVLDENYNNLANAVISVSGINHDVTSGDHGDYFRLLLPGIYTVSATAPGYDPETVTVTVGPAEPTLVNFHLKRSIPQVSPVRRAPSRRHGVRAKVQPQARKKEMEMRQLQRGPAXNPQCQATLQKGFAPALRSDQAFFLFYYLGHI

SEQ ID NO: 899 - protein, 1513 aa, Homo Sapiens
  misc_feature (1501)..(1501): Xaa can be any naturally occurring amino acid
MTRILTAFKVVRTLKTGFGFTNVTAHQKWKFSRPGIRLLSVKAQTAHIVLEDGTKMKGYSFGHPSSVAGEVVFNTGLGGYPEAITDPAYKGQILTMANPIIGNGGAPDTTALDELGLSKYLESNGIKVSGLLVLDYSKDYNHWLATKSLGQWLQEEKVPAIYGVDTRMLTKIIRDKGTMLGKIEFEGQPVDFVDPNKQNLIAEVSTKDVKVYGKGNPTKVVAVDCGIKNNVIRLLVKRGAEVHLVPWNHDFTKMEYDGILIAGGPGNPALAEPLIQNVRKILESDRKEPLFGISTGNLITGLAAGAKTYKMSMANRGQNQPVLNITNKQAFITAQNHGYALDNTLPAGWKPLFVNVNDQTNEGIMHESKPFFAVQFHPEVTPGPIDTEYLFDSFFSLIKKGKATTITSVLPKPALVASRVEVSKVLILGSGGLSIGQAGEFDYSGSQAVKAMKEENVKTVLMNPNIASVQTNEVGLKQADTVYFLPITPQFVTEVIKAEQPDGLILGMGGQTALNCGVELFKRGVLKEYGVKVLGTSVESIMATEDRQLFSDKLNEINEKIAPSFAVESIEDALKAADTIGYPVMIRSAYALGGLGSGICPNRETLMDLSTKAFAMTNQILVEKSVTGWKEIEYEVVRDADDNCVTVCNMENVDAMGVHTGDSVVVAPAQTLSNAEFQMLRRTSINVVRHLGIVGECNIQFALHPTSMEYCIIEVNARLSRSSALASKATGYPLAFIAAKIALGIPLPEIKNVVSGKTSACFEPSLDYMVTKIPRWDLDRFHGTSSRIGSSMKSVGEVMAIGRTFEESFQKALRMCHPSIEGFTPRLPMNKEWPSNLDLRKELSEPSSTRIYAIAKAIDDNMSLDEIEKLTYIDKWFLYKMRDILNMEKTLKGLNSESMTEETLKRAKEIGFSDKQISKCLGLTEAQTRELRLKKNIHPWVKQIDTLAAEYPSVTNYLYVTYNGQEHDVNFDDHGMMVLGCGPYHIGSSVEFDWCAVSSIRTLRQLGKKTVVVNCNPETVSTDFDECDKLYFEELSLERILDIYHQEACGGCIISVGGQIPNNLAVPLYKNGVKIMGTSPLQIDRAEDRSIFSAVLDELKVAQAPWKAVNTLNEALEFAKSVDYPCLLRPSYVLSGSAMNVVFSEDEMKKFLEEATRVSQEHPVVLTKFVEGAREVEMDAVGKDGRVISHAISEHVEDAGVHSGDATLMLPTQTISQGAIEKVKDATRKIAKAFAISGPFNVQFLVKGNDVLVIECNLRASRSFPFVSKTLGVDFIDVATKVMIGENVDEKHLPTLDHPIIPADYVAIKAPMFSWPRLRDADPILRCEMASTGEVACFGEGIHTAFLKAMLSTGFKIPQKGILIGIQQSFRPRFLGVAEQLHNEGFKLFATEATSDWLNANNVPATPVAWPSQEGQNPSLSSIRKLIRDGSIDLVINLPNNNTKFVHDNYVIRRTAVDSGIPLLTNFQVTKLFAEAVQKSRKVDSKSLFHYRQYSAGKAAXRCRHPSPIIKST

SEQ ID NO: 900 - protein, 1472 aa, Homo Sapiens
  misc_feature (1444)..(1444): Xaa can be any naturally occurring amino acid
MYAVYKQAHPPTGLEFSMYCNFFNNSERNLVVAGTSQLYVYRLNRDAEALTKNDRSTEGKAHREKLELAASFSFFGNVMSMASVQLAGAKRDALLLSFKDAKLSVVEYDPGTHDLKTLSLHYFEEPELRDGFVQNVHTPRVRVDPDGRCAAMLVYGTRLVVLPFRRESLAEEHEGLVGEGQRSSFLPSYIIDVRALDEKLLNIIDLQFLHGYYEPTLLILFEPNQTWPGRVAVRQDTCSIVAISLNITQKVHPVIWSLTSLPFDCTQALAVPKPIGGVVVFAVNSLLYLNQSVPPYGVALNSLTTGTTAFPLRTQEGVRITLDCAQATFISYDKMVISLKGGEIYVLTLITDGMRSVRAFHFDKAAASVLTTSMVTMEPGYLFLGSRLGNSLLLKYTEKLQEPPASAVREAADKEEPPSKKKRVDATAGWSAAGKSVPQDEVDEIEVYGSEAQSGTQLATYSFEVCDSILNIGPCANAAVGEPAFLSEEFQNSPEPDLEIVVCSGHGKNGALSVLQKSIRPQVVTTFELPGCYDMWTVIAPVRKEEEDNPKGEGTEQEPSTTPEADDDGRRHGFLILSREDSTMILQTGQEIMELDTSGFATQGPTVFAGNIGDNRYIVQVSPLGIRLLEGVNQLHFIPVDLGAPIVQCAVADPYVVIMSAEGHVTMFLLKSDSYGGRHHRLALHKPPLHHQSKVITLCLYRDLSGMFTTESRLGGARDELGGRSGPEAEGLGSETSPTVDDEEEMLYGDSGSLFSPSKEEARRSSQPPADRDPAPFRAEPTHWCLLVRENGTMEIYQLPDWRLVFLVKNFPVGQRVLVDSSFGQPTTQGEARREEATRQGELPLVKEVLLVALGSRQSRPYLLVHVDQELLIYEAFPHDSQLGQGNLKVRFKKVPHNINFREKKPKPSKKKAEGGGAEEGAGARGRVARFRYFEDIYGYSGVFICGPSPHWLLVTGRGALRLHPMAIDGPVDSFAPFHNVNCPRGFLYFNRQGELRISVLPAYLSYDAPWPVRKIPLRCTAHYVAYHVESKVYAVATSTNTPCARIPRMTGEEKEFETIERDERYIHPQQEAFSIQLISPVSWEAIPNARIELQEWEHVTCMKTVSLRSEETVSGLKGYVAAGTCLMQGEEVTCRGRILIMDVIEVVPEPGQPLTKNKFKVLYEKEQKGPVTALCHCNGHLVSAIGQKIFLWSLRASELTGMAFIDTQLYIHQMISVKNFILAADVMKSISLLRYQEESKTLSLVSRDAKPLEVYSVDFMVDNAQLGFLVSDRDRNLMVYMYLPEAKESFGGMRLLRRADFHVGAHVNTFWRTPCRGATEGLSKKSVVWENKHITWFATLDGGIGLLLPMQEKTYRRLLMLQNALTTMLPHHAGLNPRAFRMLHVDRRTLQNAVRNVLDGELLNRYLYLSTMERSELAKKIGTTPDIILDDLLETDRVTAHFXPRGCRHHQHTELPPTPFLYKTQGKTFFA

SEQ ID NO: 901 - protein, 213 aa, Homo Sapiens
  misc_feature (197)..(197): Xaa can be any naturally occurring amino acid
MRLPLLVSAGVLLVALLPCPPCRALLSRGPVPGARQAPQHPQPLDFFQPPPQSEQPQQPQARPVLLRMGEEYFLRLGNLNKSPAAPLSPASSLLAGGSGSRPSPEQATANFFRVLLQQLLLPRRSLDSPAALAERGARNALGGHQEAPERERRSEEPPISLDLTFHLLREVLEMARAEQLAQQAHSNRKLMEIIGKXNGAFGQKESAFSTKKI

SEQ ID NO: 902 - protein, 335 aa, Homo Sapiens
  misc_feature (323)..(323): Xaa can be any naturally occurring amino acid
MSPNFKLQCHFILIFLTALRGESRYLELREAADYDPFLLFSANLKRELAGEQPYRRALRCLDMLSLQGQFTFTADRPQLHCAAFFISEPEEFITIHYDQVSIDCQGGDFLKVFDGWILKGEKFPSSQDHPLPSAERYIDFCESGLSRRSIRSSQNVAMIFFRVHEPGNGFTLTIKTDPNLFPCNVISQTPNGKFTLVVPHQHRNCSFSIIYPVVIKISDLTLGHVNGLQLKKSSAGCEGIGDFVELLGGTGLDPSKMTPLADLCYPFHGPAQMKVGCDNTVVRMVSSGKHVNRVTFEYRQLEPYELENPNGNSIGEFCLSGLXITNPVIYMLIAK

SEQ ID NO: 903 - protein, 276 aa, Homo Sapiens
  misc_feature (246)..(246): Xaa can be any naturally occurring amino acid
MTLFPVLLFLVAGLLPSFPANEDKDPAFTALLTTQTQVQREIVNKHNELRRAVSPPARNMLKMEWNKEAAANAQKWANQCNYRHSNPKDRMTSLKCGENLYMSSASSSWSQAIQSWFDEYNDFDFGVGPKTPNAVVGHYTQVVWYSSYLVGCGNAYCPNQKVLKYYYVCQYCPAGNWANRLYVPYEQGAPCASCPDNCDDGLCTNGCKYEDLYSNCKSLKLTLTCKHQLVRDSCKASCNCSNSIYXIRITHRVGLCREESDYLLRFGIYLDLTYTS

SEQ ID NO: 904 - protein, 181 aa, Homo Sapiens
  misc_feature (175)..(175): Xaa can be any naturally occurring amino acid
MGKITFYEDRDFQGRCYNCISDCPNLRVYFSRCNSIRVDSGCWMLYERPNYQGHQYFLRRGKYPDYQHWMGLSDSVQSCRIIPHTSSHKLRLYERDDYRGLMSELTDDCACVPELFRLPEIYSLHVLEGCWVLYEMPNYRGRQYLLRPGDYRRYHDWGGADAKVGSLRRVTDLYXAVPALL

SEQ ID NO: 905 - protein, 518 aa, Homo Sapiens
  misc_feature (494)..(494): Xaa can be any naturally occurring amino acid
MADSEALPSLAGDPVAVEALLRAVFGVVVDEAIQKGTSVSQKVCEWKEPEELKQLLDLELRSQGESQKQILERCRAVIRYSVKTGHPRFFNQLFSGLDPHALAGRIITESLNTSQYTYEIAPVFVLMEEEVLRKLRALVGWSSGDGIFCPGGSISNMYAVNLARYQRYPDCKQRGLRTLPPLALFTSKECHYSIQKGAAFLGLGTDSVRVVKADERGKMVPEDLERQIGMAEAEGAVPFLVSATSGTTVLGAFDPLEAIADVCQRHGLWLHVDAAWGGSVLLSQTHRHLLDGIQRADSVAWNPHKLLAAGLQCSALLLQDTSNLLKRCHGSQASYLFQQDKFYDVALDTGDKVVQCGRRVDCLKLWLMWKAQGDQGLERRIDQAFVLARYLVEEMKKREGFELVMEPEFVNVCFWFVPPSLRGKQESPDYHERLSKVAPVLKERMVKEGSMMIGYQPHGTRGNFFRVVVANSALTCADMDFLLNELERLGQDLXAFSVLLPALIPPLTRRVTAFPPSL

SEQ ID NO: 906 - protein, 813 aa, Homo Sapiens
  misc_feature (805)..(805): Xaa can be any naturally occurring amino acid
MEEPGVTPQPYLGLLLEELRRVVAALPEGMRPDSNLYGFPWELVICAAVVGFFAVLFFLWRSFRSVRSRLYVGREKKLALMLSGLIEEKSKLLEKFSLVQKEYEGYEVESSLKDASFEKEATEAQSLEATCEKLNRSNSELEDEILCLEKELKEEKSKHSEQDELMADISKRIQSLEDESKSLKSQVAEAKMTFKIFQMNEERLKIAIKDALNENSQLQESQKQLLQEAEVWKEQVSELNKQKVTFEDSKVHAEQVLNDKESHIKTLTERLLKMKDWAAMLGEDITDDDNLELEMNSESENGAYLDNPPKGALKKLIHAAKLNASLKTLEGERNQIYIQLSEVDKTKEELTEHIKNLQTEQASLQSENTHFENENQKLQQKLKVMTELYQENEMKLHRKLTVEENYRLEKEEKLSKVDEKISHATEELETYRKRAKDLEEELERTIHSYQGQIISHEKKAHDNWLAARNAERNLNDLRKENAHNRQKLTETELKFELLEKDPYALDVPNTAFGREHSPYGPSPLGWPSSETRAFLSPPTLLEGPLRLSPLLPGGGGRGSRGPGNPLDHQITNERGESSCDRLTDPHRAPSDTGSLSPPWDQDRRMMFPPPGQSYPDSALPPQRQDRFCSNSGRLSGPAELRSFNMPSLDKMDGSMPSEMESSRNDTKDDLGNLNVPDSSLPAENEATGPGFVPPPLAPIRGPLFPVDARGPFLRRGPPFPPPPPGAMFGASRDYFPPGDFPGPPPAPFAMRNVYPPRGFPPYLPPRPGFFPPPPHSEGRSEFPSGLIPPSNEPATEHPEPQQETXQYFCSLQK

SEQ ID NO: 907 - protein, 425 aa, Homo Sapiens
  misc_feature (386)..(386): Xaa can be any naturally occurring amino acid
MSRPQLRRWRLVSSPPSGVPGLALLALLALLALRLAAGTDCPCPEPELCRPIRHHPDFEVFVFDVGQKTWKSYDWSQITTVATFGKYDSELMCYAHSKGARVVLKGDVSLKDIIDPAFRASWIAQKLNLAKTQYMDGINIDIEQEVNCLSPEYDALTALVKETTDSFHREIEGSQVTFDVAWSPKNIDRRCYNYTGIADACDFLFVMSYDEQSQIWSECIAAANAPYNQTLTGYNDYIKMSINPKKLVMGVPWYGYDYTCLNLSEDHVCTIAKVPFRGAPCSDAAGRQVPYKTIMKQINSSISGNLWDKDQRAPYYNYKDPAGHFHQVWYDNPQSISLKATYIQNYRLRGIGMWNANCLDYSGDAVAKQQTEEMWEVLKPKLLQRXTSFVKPLRVRKMICINRSSFLHFYYVAIYFCYPYTKKKE

SEQ ID NO: 908 - protein, 910 aa, Homo Sapiens
  misc_feature (906)..(906): Xaa can be any naturally occurring amino acid
MTSATSPIILKWDPKSLEIRTLTVERLLEPLVTQVTTLVNTSNKGPSGKKKGRSKKAHVLAASVEQATQNFLEKGEQIAKESQDLKEELVAAVEDVRKQGETMRIASSEFADDPCSSVKRGTMVRAARALLSAVTRLLILADMADVMRLLSHLKIVEEALEAVKNATNEQDLANRFKEFGKEMVKLNYVAARRQQELKDPHCRDEMAAARGALKKNATMLYTASQAFLRHPDVAATRANRDYVFKQVQEAIAGISNAAQATSPTDEAKGHTGIGELAAALNEFDNKIILDPMTFSEARFRPSLEERLESIISGAALMADSSCTRDDRRERIVAECNAVRQALQDLLSEYMNNTGRKEKGDPLNIAIDKMTKKTRDLRRQLRKAVMDHISDSFLETNVPLLVLIEAAKSGNEKEVKEYAQVFREHANKLVEVANLACSISNNEEGVKLVRMAATQIDSLCPQVINAALTLAARPQSKVAQDNMDVFKDQWEKQVRVLTEAVDDITSVDDFLSVSENHILEDVNKCVIALQEGDVDTLDRTAGAIRGRAARVIHIINAEMENYEAGVYTEKVLEATKLLSETVMPRFAEQVEVAIEALSANVPQPFEENEFIDASRLVYDGVRDIRKAVLMIRTPEELEDDSDFEQEDYDVRSRTSVQTEDDQLIAGQSARAIMAQLPQEEKAKIAEQVEIFHQEKSKLDAEVAKWDDSGNDIIVLAKQMCMIMMEMTDFTRGKGPLKNTSDVINAAKKIAEAGSRMDKLARAVADQCPDSACKQDLLAYLQRIALYCHQLNICSKVKAEVQNLGGELIVSGLDSATSLIQAAKNLMNAVVLTVKASYVASTKYQKVYGTAAVNSPVVSWKMKAPEKKPLVKREKPEEFQTRVRRGSQKKHISPVQALSEFKAMDSFXDDRF

SEQ ID NO: 909 - protein, 471 aa, Homo Sapiens
  misc_feature (464)..(464): Xaa can be any naturally occurring amino acid
MGAGPSLLLAALLLLLSGDGAVRCDTPANCTYLDLLGTWVFQVGSSGSQRDVNCSVMGPQEKKVVVYLQKLDTAYDDLGNSGHFTIIYNQGFEIVLNDYKWFAFFKYKEEGSKVTTYCNETMTGWVHDVLGRNWACFTGKKVGTASENVYVNTAHLKNSQEKYSNRLYKYDHNFVKAINAIQKSWTATTYMEYETLTLGDMIRRSGGHSRKIPRPKPAPLTAEIQQKILHLPTSWDWRNVHGINFVSPVRNQASCGSCYSFASMGMLEARIRILTNNSQTPILSPQEVVSCSQYAQGCEGGFPYLIAGKYAQDFGLVEEACFPYTGTDSPCKMKEDCFRYYSSEYHYVGGFYGGCNEALMKLELVHHGPMAVAFEVYDDFLHYKKGIYHHTGLRDPFNPFELTNHAVLLVGYGTDSASGMDYWIVKNSWGTGWGENGYFRIRRGTDECAIESIAVAATPIPKLXGMPSSIS

SEQ ID NO: 910 - protein, 350 aa, Homo Sapiens
  misc_feature (332)..(332): Xaa can be any naturally occurring amino acid
MKRLVCVLLVCSSAVAQLHKDPTLDHHWHLWKKTYGKQYKEKNEEAVRRLIWEKNLKFVMLHNLEHSMGMHSYDLGMNHLGDMTSEEVMSLMSSLRVPSQWQRNITYKSNPNRILPDSVDWREKGCVTEVKYQGSCGACWAFSAVGALEAQLKLKTGKLVSLSAQNLVDCSTEKYGNKGCNGGFMTTAFQYIIDNKGIDSDASYPYKAMDQKCQYDSKYRAATCSKYTELPYGREDVLKEAVANKGPVSVGVDARHPSFFLYRSGVYYEPSCTQNVNHGVLVVGYGDLNGKEYWLVKNSWGHNFGEEGYIRMARNKGNHCGIASFPSYPEIXRISPFYNKSRNMKHFLLT

SEQ ID NO: 911 - protein, 3652 aa, Homo Sapiens
  misc_feature (3624)..(3624): Xaa can be any naturally occurring amino acid
MMNMSLPFLWSLLTLLIFAEVNGEAGELELQRQKRSINLQQPRMATERGNLVFLTGSAQNIEFRTGSLGKIKLNDEDLSECLHQIQKNKEDIIELKGSAIGLPQNISSQIYQLNSKLVDLERKFQGLQQTVDKKVCSSNPCQNGGTCLNLHDSFFCICPPQWKGPLCSADVNECEIYSGTPLSCQNGGTCVNTMGSYSCHCPPETYGPQCASKYDDCEGGSVARCVHGICEDLMREQAGEPKYSCVCDAGWMFSPNSPACTLDRDECSFQPGPCSTLVQCFNTQGSFYCGACPTGWQGNGYICEDINECEINNGGCSVAPPVECVNTPGSSHCQACPPGYQGDGRVCTLTDICSVSNGGCHPDASCSSTLGSLPLCTCLPGYTGNGYGPNGCVQLSNICLSHPCLNGQCIDTVSGYFCKCDSGWTGVNCTENINECLSNPCLNGGTCVDGVDSFSCECTRLWTGALCQVPQQVCGESLSGINGSFSYRSPDVGYVHDVNCFWVIKTEMGKVLRITFTFFRLESMDNCPHEFLQVYDGDSSSAFQLGRFCGSSLPHELLSSDNALYFHLYSEHLRNGRGFTVRWETQQPECGGILTGPYGSIKSPGYPGNYPPGRDCVWIVVTSPDLLVTFTFGTLSLEHHDDCNKDYLEIRDGPLYQDPLLGKFCTTFSVPPLQTTGPFARIHFHSDSQISDQGFHITYLTSPSDLRCGGNYTDPEGELFLPELSGPFTHTRQCVYMMKQPQGEQIQINFTHVELQCQSDSSQNYIEVRDGETLLGKVCGNGTISHIKSITNSVWIRFKIDASVEKASFRAVYQVACGDELTGEGVIRSPFFPNVYPGERTCRWTIHQPQSQVILLNFTVFEIGSSAHCETDYVEIGSSSILGSPENKKYCGTDIPSFITSVYNFLYVTFVKSSSTENHGFMAKFSAEDLACGEILTESTGTIQSPGHPNVYPHGINCTWHILVQPNHLIHLMFETFHLEFHYNCTNDYLEVYDTDSETSLGRYCGKSIPPSLTSSGNSLMLVFVTDSDLAYEGFLINYEAISAATACLQDYTDDLGTFTSPNFPNNYPNNWECIYRITVRTGQLIAVHFTNFSLEEAIGNYYTDFLEIRDGGYEKSPLLGIFYGSNLPPTIISHSNKLWLKFKSDQIDTRSGFSAYWDGSSTGCGGNLTTSSGTFISPNYPMPYYHSSECYWWLKSSHGSAFELEFKDFHLEHHPNCTLDYLAVYDGPSSNSHLLTQLCGDEKPPLIRSSGDSMFIKLRTDEGQQGRGFKAEYRQTCENVVIVNQTYGILESIGYPNPYSENQHCNWTIRATTGNTVNYTFLAFDLEHHINCSTDYLELYDGPRQMGRYCGVDLPPPGSTTSSKLQVLLLTDGVGRREKGFQMQWFVYGCGGELSGATGSFSSPGFPNRYPPNKECIWYIRTDPGSSIQLTIHDFDVEYHSRCNFDVLEIYGGPDFHSPRIAQLCTQRSPENPMQVSSTGNELAIRFKTDLSINGRGFNASWQAVTGGCGGIFQAPSGEIHSPNYPSPYRSNTDCSWVIRVDRNHRVLLNFTDFDLEPQDSCIMAYDGLSSTMSRLARTCGREQLANPIVSSGNSLFLRFQSGPSRQNRGFRAQFRQACGGHILTSSFDTVSSPRFPANYPNNQNCSWIIQAQPPLNHITLSFTHFELERSTTCARDFVEILDGGHEDAPLRGRYCGTDMPHPITSFSSALTLRFVSDSSISAGGFHTTVTASVSACGGTFYMAEGIFNSPGYPDIYPPNVECVWNIVSSPGNRLQLSFISFQLEDSQDCSRDFVEIREGNATGHLVGRYCGNSFPLNYSSIVGHTLWVRFISDGSGSGTGFQATFMKIFGNDNIVGTHGKVASPFWPENYPHNSNYQWTVNVNASHVVHGRILEMDIEEIQNCYYDKLRIYDGPSIHARLIGAYCGTQTESFSSTGNSLTFHFYSDSSISGKGFLLEWFAVDAPDGVLPTIAPGACGGFLRTGDAPVFLFSPGWPDSYSNRVDCTWLIQAPDSTVELNILSLDIESHRTCAYDSLVIRDGDNNLAQQLAVLCGREIPGPIRSTGEYMFIRFTSDSSVTRAGFNASFHKSCGGYLHADRGIITSPKYPETYPSNLNCSWHVLVQSGLTIAVHFEQPFQIPNGDSSCNQGDYLVLRNGPDICSPPLGPPGGNGHFCGSHASSTLFTSDNQMFVQFISDHSNEGQGFKIKYEAKSLACGGNVYIHDADSAGYVTSPNHPHNYPPHADCIWILAAPPETRIQLQFEDRFDIEVTPNCTSNYLELRDGVDSDAPILSKFCGTSLPSSQWSSGEVMYLRFRSDNSPTHVGFKAKYSIAQCGGRVPGQSGVVESIGHPTLPYRDNLFCEWHLQGLSGHYLTISFEDFNLQNSSGCEKDFVEIWDNHTSGNILGRYCGNTIPDSIDTSSNTAVVRFVTDGSVTASGFRLRFESSMEECGGDLQGSIGTFTSPNYPNPNPHGRICEWRITAPEGRRITLMFNNLRLATHPSCNNEHVIVFNGIRSNSPQLEKLCSSVNVSNEIKSSGNTMKVIFFTDGSRPYGGFTASYTSSEDAVCGGSLPNTPEGNFTSPGYDGVRNYSRNLNCEWTLSNPNQGNSSISIHFEDFYLESHQDCQFDVLEFRVGDADGPLMWRLCGPSKPTLPLVIPYSQVWIHFVTNERVEHIGFHAKYSFTDCGGIQIGDSGVITSPNYPNAYDSLTHCSSLLEAPQGHTITLTFSDFDIEPHTTCAWDSVTVRNGGSPESPIIGQYCGNSNPRTIQSGSNQLVVTFNSDHSLQGGGFYATWNTQTLGCGGIFHSDNGTIRSPHWPQNFPENSRCSWTAITHKSKHLEISFDNNFLIPSGDGQCQNSFVKVWAGTEEVDKALLATGCGNVAPGPVITPSNTFTAVFQSQEAPAQGFSASFVSRCGSNFTGPSGYIISPNYPKQYDNNMNCTYVIEANPLSVVLLTFVSFHLEARSAVTGSCVNDGVHIIRGYSVMSTPFATVCGDEMPAPLTIAGPVLLNFYSNEQITDFGFKFSYRIISCGGVFNFSSGIITSPAYSYADYPNDMHCLYTITVSDDKVIELKFSDFDVVPSTSCSHDYLAIYDGANTSDPLLGKFCGSKRPPNVKSSNNSMLLVFKTDSFQTAKGWKMSFRQTLGPQQGCGGYLTGSNNTFASPDSDSNGMYDKNLNCVWIIIAPVNKVIHLTFNTFALEAASTRQRCLYDYVKLYDGDSENANLAGTFCGSTVPAPFISSGNFLTVQFISDLTLEREGFNATYTIMDMPCGGTYNATWTPQNISSPNSSDPDVPFSICTWVIDSPPHQQVKITVWALQLTSQDCTQNYLQLQDSPQGHGNSRFQFCGRNASAVPVFYSSMSTAMVIFKSGVVNRNSRMSFTYQIADCNRDYHKAFGNLRSPGWPDNYDNDKDCTVTLTAPQNHTISLFFHSLGIENSVECRNDFLEVRNGSNSNSPLLGKYCGTLLPNPVFSQNNELYLRFKSDSVTSDRGYEIIWTSSPSGCGGTLYGDRGSFTSPGYPGTYPNNTYCEWVLVAPAGRLVTINFYFISIDDPGDCVQNYLTLYDGPNASSPSSGPYCGGDTSIAPFVASSNQVFIKFHADYARRPSAFRLTWDSXVGNNSCSLSTFPLQHAGQHSAILIHDPC

SEQ ID NO: 912 - protein, 790 aa, Homo Sapiens
  misc_feature (769)..(769): Xaa can be any naturally occurring amino acid
MSNLSKGTGSRKDTKMRIRAFPMTMDEKYVNSIWDLLKNAIQEIQRKNNSGLSFEELYRNAYTMVLHKHGEKLYTGLREVVTEHLINKVREDVLNSLNNNFLQTLNQAWNDHQTAMVMIRDILMYMDRVYVQQNNVENVYNLGLIIFRDQVVRYGCIRDHLRQTLLDMIARERKGEVVDRGAIRNACQMLMILGLEGRSVYEEDFEAPFLEMSAEFFQMESQKFLAENSASVYIKKVEARINEEIERVMHCLDKSTEEPIVKVVERELISKHMKTIVEMENSGLVHMLKNGKTEDLGCMYKLFSRVPNGLKTMCECMSSYLREQGKALVSEEGEGKNPVDYIQGLLDLKSRFDRFLLESFNNDRLFKQTIAGDFEYFLNLNSRSPEYLSLFIDDKLKKGVKGLTEQEVETILDKAMVLFRFMQEKDVFERYYKQHLARRLLTNKSVSDDSEKNMISKLKTECGCQFTSKLEGMFRDMSISNTTMDEFRQHLQATGVSLGGVDLTVRVLTTGYWPTQSATPKCNIPPAPRHAFEIFRRFYLAKHSGRQLTLQHHMGSADLNATFYGPVKKEDGSEVGVGGAQVTGSNTRKHILQVSTFQMTILMLFNNREKYTFEEIQQETDIPERELVRALQSLACGKPTQRVLTKEPKSKEIENGHIFTVNDQFTSKLHRVKIQTVAAKQGESDPERKETRQKVDDDRKHEIEAAIVRIMKSRKKMQHNVLVAEVTQQLKARFLPSPVVIKKRIEGLIEREYLARTPEDRKVYTYVAXNAFRNLIYSWTVLFAWTGKFF

SEQ ID NO: 913 - protein, 390 aa, Homo Sapiens
  misc_feature (356)..(356): Xaa can be any naturally occurring amino acid
MDQFPESVTENFEYDDLAEACYIGDIVVFGTVFLSIFYSVIFAIGLVGNLLVVFALTNSKKPKSVTDIYLLNLALSDLLFVATLPFWTHYLINEKGLHNAMCKFTTAFFFIGFFGSIFFITVISIDRYLAIVLAANSMNNRTVQHGVTISLGVWAAAILVAAPQFMFTKQKENECLGDYPEVLQEIWPVLRNVETNFLGFLLPLLIMSYCYFRIIQTLFSCKNHKKAKAIKLILLVVIVFFLFWTPYNVMIFLETLKLYDFFPSCDMRKDLRLALSVTETVAFSHCCLNPLIYAFAGEKFRRYLYHLYGKCLAVLCGRSVHVDFSSSESQRSRHGSVLSSNFTYHTSDGDALLLLXRESQSLVSTENLEFLNLMLTSEERFLLLFLTGTK

SEQ ID NO: 914 - protein, 104 aa, Homo Sapiens
  misc_feature (94)..(94): Xaa can be any naturally occurring amino acid
MNAKVVVVLVLVLTALCLSDGKPVSLSYRCPCRFFESHVARANVKHLKILNTPNCALQIVARLKNNNRQVCIDPKLKWIQEYLEKALNKRFKMXEGQTPEEPLQ

SEQ ID NO: 915 - protein, 99 aa, Homo Sapiens
  misc_feature (90)..(90): Xaa can be any naturally occurring amino acid
MNAKVVVVLVLVLTALCLSDGKPVSLSYRCPCRFFESHVARANVKHLKILNTPNCALQIVARLKNNNRQVCIDPKLKWIQEYLEKALNKXAQQPKRTFR

SEQ ID NO: 916 - protein, 142 aa, Homo Sapiens
  misc_feature (108)..(108): Xaa can be any naturally occurring amino acid
MAHATLSAAPSNPRLLRVALLLLLLVAASRRAAGASVVTELRCQCLQTLQGIHLKNIQSVNVRSPGPHCAQTEVIATLKNGKKACLNPASPMVQKIIEKILNKGSTNXQERSKKLISVSLTLPAGWSLPLPELKMKKRTAAF

SEQ ID NO: 917 - protein, 353 aa, Homo Sapiens
  misc_feature (326)..(326): Xaa can be any naturally occurring amino acid
MAAAAASLRGVVLGPRGAGLPGARARGLLCSARPGQLPLRTPQAVALSSKSGLSRGRKVMLSALGMLAAGGAGLAVALHSAVSASDLELHPPSYPWSHRGLLSSLDHTSIRRGFQVYKQVCASCHSMDFVAYRHLVGVCYTEDEAKELAAEVEVQDGPNEDGEMFMRPGKLFDYFPKPYPNSEAARAANNGALPPDLSYIVRARHGGEDYVFSLLTGYCEPPTGVSLREGLYFNPYFPGQAIAMAPPIYTDVLEFDDGTPATMSQIAKDVCTFLRWASEPEHDHRKRMGLKMLMMMALLVPLVYTIKRHKWSVLKSRKLAYRPPKXPCPVSACHPARTGPQAQEPSQACSGLS

SEQ ID NO: 918 - protein, 905 aa, Homo Sapiens
  misc_feature (896)..(896): Xaa can be any naturally occurring amino acid
MRMSVGLSLLLPLWGRTFLLLLSVVMAQSHWPSEPSEAVRDWENQLEASMHSVLSDLHEAVPTVVGIPDGTAVVGRSFRVTIPTDLIASSGDIIKVSAAGKEALPSWLHWDSQSHTLEGLPLDTDKGVHYISVSATRLGANGSHIPQTSSVFSIEVYPEDHSELQSVRTASPDPGEVVSSACAADEPVTVLTVILDADLTKMTPKQRIDLLHRMRSFSEVELHNMKLVPVVNNRLFDMSAFMAGPGNAKKVVENGALLSWKLGCSLNQNSVPDIHGVEAPAREGAMSAQLGYPVVGWHIANKKPPLPKRVRRQIHATPTPVTAIGPPTTAIQEPPSRIVPTPTSPAIAPPTETMAPPVRDPVPGKPTVTIRTRGAIIQTPTLGPIQPTRVSEAGTTVPGQIRPTMTIPGYVEPTAVATPPTTTTKKPRVSTPKPATPSTDSTTTTTRRPTKKPRTPRPVPRVTTKVSITRLETASPPTRIRTTTSGVPRGGEPNQRPELKNHIDRVDAWVGTYFEVKIPSDTFYDHEDTTTDKLKLTLKLREQQLVGEKSWVQFNSNSQLMYGLPDSSHVGKHEYFMHATDKGGLSAVDAFEIHVHRRPQGDRAPARFKAKFVGDPALVLNDIHKKIALVKKLAFAFGDRNCSTITLQNITRGSIVVEWTNNTLPLEPCPKEQIAGLSRRIAEDDGKPRPAFSNALEPDFKATSITVTGSGSCRHLQFIPVVPPRRVPSEAPPTEVPDRDPEKSSEDDVYLHTVIPAVVVAAILLIAGIIAMICYRKKRKGKLTLEDQATFIKKGVPIIFADELDDSKPPPSSSMPLILQEEKAPLPPPEYPNQSVPETTPLNQDTMGEYTPLRDEDPNAPPYQPPPPFTAPMEGKGSRPKNMTPYRSPPPYVPPXPASAWVEAG

SEQ ID NO: 919 - protein, 1071 aa, Homo Sapiens
  misc_feature (1043)..(1043): Xaa can be any naturally occurring amino acid
MPGIVVFRRRWSVGSDDLVLPAIFLFLLHTTWFVILSVVLFGLVYNPHEACSLNLVDHGRGYLGILLSCMIAEMAIIWLSMRGGILYTEPRDSMQYVLYVRLAILVIEFIYAIVGIVWLTQYYTSCNDLTAKNVTLGMVVCNWVVILSVCITVLCVFDPTGRTFVKLRATKRRQRNLRTYNLRHRLEEGQATSWSRRLKVFLCCTRTKDSQSDAYSEIAYLFAEFFRDLDIVPSDIIAGLVLLRQRQRAKRNAVLDEANNDILAFLSGMPVTRNTKYLDLKNSQEMLRYKEVCYYMLFALAAYGWPMYLMRKPACGLCQLARSCSCCLCPARPRFAPGVTIEEDNCCGCNAIAIRRHFLDENMTAVDIVYTSCHDAVYETPFYVAVDHDKKKVVISIRGTLSPKDALTDLTGDAERLPVEGHHGTWLGHKGMVLSAEYIKKKLEQEMVLSQAFGRDLGRGTKHYGLIVVGHSLGAGTAAILSFLLRPQYPTLKCFAYSPPGGLLSEDAMEYSKEFVTAVVLGKDLVPRIGLSQLEGFRRQLLDVLQRSTKPKWRIIVGATKCIPKSELPEEVEVTTLASTRLWTHPSDLTIALSASTPLYPPGRIIHVVHNHPAEQCCCCEQEEPTYFAIWGDNKAFNEVIISPAMLHEHLPYVVMEGLNKVLENYNKGKTALLSAAKVMVSPTEVDLTPELIFQQQPLPTGPPMPTGLALELPTADHRNSSVRSKSQSEMSLEGFSEGRLLSPVVAAAARQDPVELLLLSTQERLAAELQARRAPLATMESLSDTESLYSFDSRRSSGFRSIRGSPSLHAVLERDEGHLFYIDPAIPEENPSLSSRTELLAADSLSKHSQDTQPLEAALGSGGVTPERPPSAAANDEEEEVGGGGGGPASRGELALHNGRLGDSPSPQVLEFAEFIDSLFNLDSKSSSFQDLYCMVVPESPTSDYAEGPKSPSQQEILLRAQFEPNLVPKPPRLFAGSADPSSGISLSPSFPLSSSGELMDLTPTGLSSQECLAADKIRTSTPTGHGASPAKQDELVISARXHPSCVASRAQAGAGGPVGTWCLPPAGQL

SEQ ID NO: 920 - protein, 654 aa, Homo Sapiens
  misc_feature (618)..(618): Xaa can be any naturally occurring amino acid
MPALSRWASLPGPSMREAAFMYSTAVAIFLVILVAALQGSAPRESPLPYHIPLDPEGSLELSWNVSYTQEAIHFQLLVRRLKAGVLFGMSDRGELENADLVVLWTDGDTAYFADAWSDQKGQIHLDPQQDYQLLQVQRTPEGLTLLFKRPFGTCDPKDYLIEDGTVHLVYGILEEPFRSLEAINGSGLQMGLQRVQLLKPNIPEPELPSDACTMEVQAPNIQIPSQETTYWCYIKELPKGFSRHHIIKYEPIVTKGNEALVHHMEVFQCAPEMDSVPHFSGPCDSKMKPDRLNYCRHVLAAWALGAKAFYYPEEAGLAFGGPGSSRYLRLEVHYHNPLVIEGRNDSSGIRLYYTAKLRRFNAGIMELGLVYTPVMAIPPRETAFILTGYCTDKCTQLALPPSGIHIFASQLHTHLTGRKVVTVLVRDGREWEIVNQDNHYSPHFQEIRMLKKVVSVHPGDVLITSCTYNTEDRELATVGGFGILEEMCVNYVHYYPQTQLELCKSAVDAGFLQKYFHLINRFNNEDVCTCPQASVSQQFTSVPWNSFNRDVLKALYSFAPISMHCNKSSAVRFQGEWNLQPLPKVISTLEEPTPQCPTSQGRSPAGPTVVSIGGGKGXGGTYSSPSSMLSLWAHTGTVHSTLRRSPWNSPARPG

SEQ ID NO: 921 - protein, 1308 aa, Homo Sapiens
  misc_feature (1279)..(1279): Xaa can be any naturally occurring amino acid
MAQSKRHVYSRTPSGSRMSAEASARPLRVGSRVEVIGKGHRGTVAYVGATLFATGKWVGVILDEAKGKNDGTVQGRKYFTCDEGHGIFVRQSQIQVFEDGADTTSPETPDSSASKVLKREGTDTTAKTSKLRGLKPKKAPTARKTTTRRPKPTRPASTGVAGASSSLGPSGSASAGELSSSEPSTPAQTPLAAPIIPTPVLTSPGAVPPLPSPSKEEEGLRAQVRDLEEKLETLRLKRAEDKAKLKELEKHKIQLEQVQEWKSKMQEQQADLQRRLKEARKEAKEALEAKERYMEEMADTADAIEMATLDKEMAEERAESLQQEVEALKERVDELTTDLEILKAEIEEKGSDGAASSYQLKQLEEQNARLKDALVRMRDLSSSEKQEHVKLQKLMEKKNQELEVVRQQRERLQEELSQAESTIDELKEQVDAALGAEEMVEMLTDRNLNLEEKVRELRETVGDLEAMNEMNDELQENARETELELREQLDMAGARVREAQKRVEAAQETVADYQQTIKKYRQLTAHLQDVNRELTNQQEASVERQQQPPPETFDFKIKFAETKAHAKAIEMELRQMEVAQANRHMSLLTAFMPDSFLRPGGDHDCVLVLLLMPRLICKAELIRKQAQEKFELSENCSERPGLRGAAGEQLSFAAGLVYSLSLLQATLHRYEHALSQCSVDVYKKVGSLYPEMSAHERSLDFLIELLHKDQLDETVNVEPLTKAIKYYQHLYSIHLAEQPEDCTMQLADHIKFTQSALDCMSVEVGRLRAFLQGGQEATDIALLLRDLETSCSDIRQFCKKIRRRMPGTDAPGIPAALAFGPQVSDTLLDCRKHLTWVVAVLQEVAAAAAQLIAPLAENEGLLVAALEELAFKASEQIYGTPSSSPYECLRQSCNILISTMNKLATAMQEGEYDAERPPSKPPPVELRAAALRAEITDAEGLGLKLEDRETVIKELKKSLKIKGEELSEANVRLSLLEKKLDSAAKDADERIEKVQTRLEETQALLRKKEKEFEETMDALQADIDQLEAEKAELKQRLNSQSKRTIEGLRGPPPSGIATLVSGIAGEEQQRGAIPGQAPGSVPGPGLVKDSPLLLQQISAMRLHISQLQHENSILKGAQMKASLASLPPLHVAKLSHEGPGSELPAGALYRKTSQLLETLNQLSTHTHVVDITRTSPAAKSPSAQLMEQVAQLKSLSDTVEKLKDEVLKETVSQRPGATVPTDFATFPSSAFLRAKEEQQDDTVYMGKVTFSCAAGFGQRHRLVLTQEQLHQLHSRLISXALLSPAVPFDPQPSGAALPDAQPPQPAPR

SEQ ID NO: 922 - protein, 1194 aa, Homo Sapiens
  misc_feature (1141)..(1141): Xaa can be any naturally occurring amino acid
MSYNYVVTAQKPTAVNGCVTGHFTSAEDLNLLIAKNTRLEIYVVTAEGLRPVKEVGMYGKIAVMELFRPKGESKDLLFILTAKYNACILEYKQSGESIDIITRAHGNVQDRIGRPSETGIIGIIDPECRMIGLRLYDGLFKVIPLDRDNKELKAFNIRLEELHVIDVKFLYGCQAPTICFVYQDPQGRHVKTYEVSLREKEFNKGPWKQENVEAEASMVIAVPEPFGGAIIIGQESITYHNGDKYLAIAPPIIKQSTIVCHNRVDPNGSRYLLGDMEGRLFMLLLEKEEQMDGTVTLKDLRVELLGETSIAECLTYLDNGVVFVGSRLGDSQLVKLNVDSNEQGSYVVAMETFTNLGPIVDMCVVDLERQGQGQLVTCSGAFKEGSLRIIRNGIGIHEHASIDLPGIKGLWPLRSDPNRETDDTLVLSFVGQTRVLMLNGEEVEETELMGFVDDQQTFFCGNVAHQQLIQITSASVRLVSQEPKALVSEWKEPQAKNISVASCNSSQVVVAVGRALYYLQIHPQELRQISHTEMEHEVACLDITPLGDSNGLSPLCAIGLWTDISARILKLPSFELLHKEMLGGEIIPRSILMTTFESSHYLLCALGDGALFYFGLNIETGLLSDRKKVTLGTQPTVLRTFRSLSTTNVFACSDRPTVIYSSNHKLVFSNVNLKEVNYMCPLNSDGYPDSLALANNSTLTIGTIDEIQKLHIRTVPLYESPRKICYQEVSQCFGVLSSRIEVQDTSGGTTALRPSASTQALSSSVSSSKLFSSSTAPHETSFGEEVEVHNLLIIDQHTFEVLHAHQFLQNEYALSLVSCKLGKDPNTYFIVGTAMVYPEEAEPKQGRIVVFQYSDGKLQTVAEKEVKGAVYSMVEFNGKLLASINSTVRLYEWTTEKELRTECNHYNNIMALYLKTKGDFILVGDLMRSVLLLAYKPMEGNFEEIARDFNPNWMSAVEILDDDNFLGAENAFNLFVCQKDSAATTDEERQHLQEVGLFHLGEFVNVFCHGSLVMQNLGETSTPTQGSVLFGTVNGMIGLVTSLSESWYNLLLDMQNRLNKVIKSVGKIEHSFWRSFHTERKTEPATGFIDGDLIESFLDISRPKMQEVVANLQYDDGSGMKREATADDLIKVVEELTRIHXPRAGGPFADPPQRLCPAALPLLSTIVFLAMGGLSLSQLPPEPQFPYVEVGRAS

SEQ ID NO: 923 - protein, 889 aa, Homo Sapiens
  misc_feature (876)..(876): Xaa can be any naturally occurring amino acid
MGKTANSPGSGARPDPVRSFNRWKKKHSHRQNKKKQLRKQLKKPEWQVERESISRLMQNYEKINVNEITRFSDFPLSKKTLKGLQEAQYRLVTEIQKQTIGLALQGKDVLGAAKTGSGKTLAFLVPVLEALYRLQWTSTDGLGVLIISPTRELAYQTFEVLRKVGKNHDFSAGLIIGGKDLKHEAERINNINILVCTPGRLLQHMDETVSFHATDLQMLVLDEADRILDMGFADTMNAVIENLPKKRQTLLFSATQTKSVKDLARLSLKNPEYVWVHEKAKYSTPATLEQNYIVCELQQKISVLYSFLRSHLKKKSIVFFSSCKEVQYLYRVFCRLRPGVSILALHGRQQQMRRMEVYNEFVRKRAAVLFATDIAARGLDFPAVNWVLQFDCPEDANTYIHRAGRTARYKEDGEALLILLPSEKAMVQQLLQKKVPVKEIKINPEKLIDVQKKLESILAQDQDLKERAQRCFVSYVRSVYLMKDKEVFDVSKLPIPEYALSLGLAVAPRVRFLQKMQKQPTKELVRSQADKVIEPRAPSLTNDEVEEFRAYFNEKMSILQKGGKRLEGTEHRQDNDTGNEEQEEEEDDEEEMEEKLAKAKGSQAPSLPNTSEAQKIKEVPTQFLDRDEEEEDADFLKVKRHNVFGLDLKDEKTLQKKEPSKSSIKKKMTKVAEAKKVMKRNFKVNKKITFTDEGELVQQWPQMQKSAIKDAEEDDDTGGINLHKAKERLQEEDKFDKEEYRKKIKAKHREKRLKEREARREANKRQAKAKDEEEAFLDWSDDDDDDDDGFDPSTLPDPDKYRSSEDSDSEDMENKISDTKKKQGMKKRSNSEVEDVGPTSHNRKKARWDTLEPLDTGLSLAEDEELVLHLLRSQSXILPAPAFSLKPWL

SEQ ID NO: 924 - protein, 678 aa, Homo Sapiens
  misc_feature (671)..(671): Xaa can be any naturally occurring amino acid
MSHLPMKLLRKKIEKRNLKLRQRNLKFQGASNLTLSETQNGDVSEETMGSRKVKKSKQKPMNVGLSETQNGGMSQEAVGNIKVTKSPQKSTVLTNGEAAMQSSNSESKKKKKKKRKMVNDAEPDTKKAKTENKGKSEEESAETTKETENNVEKPDNDEDESEVPSLPLGLTGAFEDTSFASLCNLVNENTLKAIKEMGFTNMTEIQHKSIRPLLEGRDLLAAAKTGSGKTLAFLIPAVELIVKLRFMPRNGTGVLILSPTRELAMQTFGVLKELMTHHVHTYGLIMGGSNRSAEAQKLGNGINIIVATPGRLLDHMQNTPGFMYKNLQCLVIDEADRILDVGFEEELKQIIKLLPTRRQTMLFSATQTRKVEDLARISLKKEPLYVGVDDDKANATVDGLEQGYVVCPSEKRFLLLFTFLKKNRKKKLMVFFSSCMSVKYHYELLNYIDLPVLAIHGKQKQNKRTTTFFQFCNADSGTLLCTDVAARGLDIPEVDWIVQYDPPDDPKEYIHRVGRTARGLNGRGHALLILRPEELGFLRYLKQSKVPLSEFDFSWSKISDIQSQLEKLIEKNYFLHKSAQEAYKSYIRAYDSHSLKQIFNVNNLNLPQVALSFGFKVPPFVDLNVNSNEGKQKKRGGGGGFGYQKTKKVEKSKIFKHISKKSSDSRQFSHXTHAFLSS

SEQ ID NO: 925 - protein, 1364 aa, Homo Sapiens
  misc_feature (1171)..(1171): Xaa can be any naturally occurring amino acid
MNMFLYFQTIIKEGMLTKQNNSFQRSKRRYFKLRGRTLYYAKTAKSIIFDEVDLTDASVAESSTKNVNNSFTVITPCRKLILCADNRKEMEDWIAALKTVQNREHFEPTQYSMDHFSGMHNWYACSHARPTYCNVCREALSGVTSHGLSCEVCKFKAHKRCAVRATNNCKWTTLASIGKDIIEDADGIAMPHQWLEGNLPVSAKCTVCDKTCGSVLRLQDWRCLWCKAMVHTSCKESLLTKCPLGLCKVSVIPPTALNSIDSDGFWKASCPPSCTSPLLVFVNSKSGDNQGVKFLRRFKQLLNPAQVFDLMNGGPHLGLRLFQKFDTFRILVCGGDGSVGWVLSEIDSLNLHKQCQLGVLPLGTGNDLARVLGWGSACDDDTQLPQILEKLERASTKMLDRWSVMAYEAKLPRQASSSTVTEDFSEDSEVQQILFYEDSVAAHLSKILTSDQHSVVISSAKVLCETVKDFVARVGKAYEKTTESSEESEVMAKKCSVLKEKLDSLLKTLDDESQASSSLPNPPPTIAEEAEDGDGSGSICGSTGDRLVASACPARPQIFRPREQLMLRANSLKKAIRQIIEHTEKAVDEQNAQTQEQEGFVLGLSESEEKMDHRVCPPLSHSESFGVPKGRSQRKVSKSPCEKLISKGSLSLGSSASLPPQPGSRDGLPALNTKILYPNVRAGMSGSLPGGSVISRLLINADPFNSEPETLEYYTEKCVMNNYFGIGLDAKISLDFNNKRDEHPEKCRSRTKNMMWYGVLGTKELLHRTYKNLEQKVLLECDGRPIPLPSLQGIAVLNIPSYAGGTNFWGGTKEDDTFAAPSFDDKILEVVAVFGSMQMAVSRVIRLQHHRIAQCRTVKISILGDEGVPVQVDGEAWVQPPGYIRIVHKNRAQTLTRDRAFESTLKSWEDKQKCELPRPPSCSLHPEMLSEEEATQMDQFGQAAGVLIHSIREIAQSHRDMEQELAHAVNASSKSMDRVYGKPRTTEGLNCSFVLEMVNNFRALRSETELLLSGKMALQLDPPQKEQLGSALAEMDRQLRRLADTPWLCQSAEPGDEESVMLDLAKRSRSGKFRLVTKFKKEKNNKNKEAHSSLGAPVHLWGTEEVAAWLEHLSLCEYKDIFTRHDIRGSELLHLERRDLKDLGVTKVGHMKRILCGIKELSRSAPAVEAXPLSSQPVASTSPPPRPSLRPLSLWPLRLLPLRPWADAAARPLLMVLLPLSATESLRDTVHQSSGVSNITTQLPLKQHFLQLRVTWGTCVTATQLSPACAVGQGIQRRLASWALLAWPRAWIVPGAPLRVSFCGRTVWLRLLAPSQFSETWLGPSTAACKGPCLLMQLLLNKNRALSWFESSMDVSSLVDCNLT

SEQ ID NO: 926 - protein, 1002 aa, Homo Sapiens
  misc_feature (943)..(943): Xaa can be any naturally occurring amino acid
MAAAAEPGARAWLGGGSPRPGSPACSPVLGSGGRARPGPGPGPGPERAGVRAPGPAAAPGHSFRKVTLTKPTFCHLCSDFIWGLAGFLCDVCNFMSHEKCLKHVRIPCTSVAPSLVRVPVAHCFGPRGLHKRKFCAVCRKVLEAPALHCEVCELHLHPDCVPFACSDCRQCHQDGHQDHDTHHHHWREGNLPSGARCEVCRKTCGSSDVLAGVRCEWCGVQAHSLCSAALAPECGFGRLRSLVLPPACVRLLPGGFSKTQSFRIVEAAEPGEGGDGADGSAAVGPGRETQATPESGKQTLKIFDGDDAVRRSQFRLVTVSRLAGAEEVLEAALRAHHIPEDPGHLELCRLPPSSQACDAWAGGKAGSAVISEEGRSPGSGEATPEAWVIRALPRAQEVLKIYPGWLKVGVAYVSVRVTPKSTARSVVLEVLPLLGRQAESPESFQLVEVAMGCRHVQRTMLMDEQPLLDRLQDIRQMSVRQVSQTRFYVAESRDVAPHVSLFVGGLPPGLSPEEYSSLLHEAGATKATVVSVSHIYSSQGAVVLDVACFAEAERLYMLLKDMAVRGRLLTALVLPDLLHAKLPPDSCPLLVFVNPKSGGLKGRDLLCSFRKLLNPHQVFDLTNGGPLPGLHLFSQVPCFRVLVCGGDGTVGWVLGALEETRYRLACPEPSVAILPLGTGNDLGRVLRWGAGYSGEDPFSVLLSVDEADAVLMDRWTILLDAHEAGSAENDTADAEPPKIVQMSNYCGIGIDAELSLDFHQAREEEPGKFTSRLHNKGVYVRVGLQKISHSRSLHKQIRLQVERQEVELPSIEGLIFINIPSWGSGADLWGSDSDTRFEKPRMDDGLLEVVGVTGVVHMGQVQGGLRSGIRIAQGSYFRVTLLKATPVQVDGEPWVQAPGHMIISAAGPKVHMLRKAKQKPRRAGTTRDARADAAPAPESDPRXGWLGQPKGSSHLCSRQPCFQVVWRQLHVHTVAGPVVGPGYSPDHSIFPVTERDPPSSHW

SEQ ID NO: 927 - protein, 401 aa, Homo Sapiens
  misc_feature (397)..(397): Xaa can be any naturally occurring amino acid
MALLTNLLPLCCLALLALPAQSCGPGRGPVGRRRYARKQLVPLLYKQFVPGVPERTLGASGPAEGRVARGSERFRDLVPNYNPDIIFKDEENSGADRLMTERCKERVNALAIAVMNMWPGVRLRVTEGWDEDGHHAQDSLHYEGRALDITTSDRDRNKYGLLARLAVEAGFDWVYYESRNHVHVSVKADNSLAVRAGGCFPGNATVRLWSGERKGLRELHRGDWVLAADASGRVVPTPVLLFLDRDLQRRASFVAVETEWPPRKLLLTPWHLVFAARGPAPAPGDFAPVFARRLRAGDSVLAPGGDALRPARVARVAREEAVGVFAPLTAHGTLLVNDVLASCYAVLESHQWAHRAFAPLRLLHALGALLPGGAVQPTGMHWYSRLLYRLAEELLGXASQA

SEQ ID NO: 928 - protein, 793 aa, Homo Sapiens
  misc_feature (767)..(767): Xaa can be any naturally occurring amino acid
MKTPWKVLLGLLGAAALVTIITVPVVLLNKGTDDATADSRKTYTLTDYLKNTYRLKLYSLRWISDHEYLYKQENNILVFNAEYGNSSVFLENSTFDEFGHSINDYSISPDGQFILLEYNYVKQWRHSYTASYDIYDLNKRQLITEERIPNNTQWVTWSPVGHKLAYVWNNDIYVKIEPNLPSYRITWTGKEDIIYNGITDWVYEEEVFSAYSALWWSPNGTFLAYAQFNDTEVPLIEYSFYSDESLQYPKTVRVPYPKAGAVNPTVKFFVVNTDSLSSVTNATSIQITAPASMLIGDHYLCDVTWATQERISLQWLRRIQNYSVMDICDYDESSGRWNCLVARQHIEMSTTGWVGRFRPSEPHFTLDGNSFYKIISNEEGYRHICYFQIDKKDCTFITKGTWEVIGIEALTSDYLYYISNEYKGMPGGRNLYKIQLSDYTKVTCLSCELNPERCQYYSVSFSKEAKYYQLRCSGPGLPLYTLHSSVNDKGLRVLEDNSALDKMLQNVQMPSKKLDFIILNETKFWYQMILPPHFDKSKKYPLLLDVYAGPCSQKADTVFRLNWATYLASTENIIVASFDGRGSGYQGDKIMHAINRRLGTFEVEDQIEAARQFSKMGFVDNKRIAIWGWSYGGYVTSMVLGSGSGVFKCGIAVAPVSRWEYYDSVYTERYMGLPTPEDNLDHYRNSTVMSRAENFKQVEYLLIHGTADDNVHFQQSAQISKALVDVGVDFQAMWYTDEDHGIASSTAHQHIYTHMSHFIKQCFSLPXHLKIPCHLKLIKTHFCFHYLKTALSR

SEQ ID NO: 929 - protein, 415 aa, Homo Sapiens
  misc_feature (365)..(365): Xaa can be any naturally occurring amino acid
MGILEKISEIEKEIARTQKNKATEYHLGLLKAKLAKYRAQLLEPSKSASSKGEGFDVMKSGDARVALIGFPSVGKSTFLSLMTSTASEAASYEFTTLTCIPGVIEYKGANIQLLDLPGIIEGAAQGKGRGRQVIAVARTADVIIMMLDATKGEVQRSLLEKELESVGIRLNKHKPNIYFKPKKGGGISFNSTVTLTQCSEKLVQLILHEYKIFNAEVLFREDCSPDEFIDVIVGNRVYMPCLYVYNKIDQISMEEVDRLARKPNSVVISCGMKLNLDYLLEMLWEYLALTCIYTKKRGQRPDFTDAIILRKGASVEHVCHRIHRSLASQFKYALVWGTSTKYSPQRVGLTHTMEHEDVIQIVKKXRRLPGLPPTCLVSLGRWSHWDTQTPKQKNTNTRTPGRGPSSLCYLQKFLQ

SEQ ID NO: 930 - protein, 1134 aa, Homo Sapiens
  misc_feature (1119)..(1119): Xaa can be any naturally occurring amino acid
MARSPGRAYALLLLLICFNVGSGLHLQVLSTRNENKLLPKHPHLVRQKRAWITAPVALREGEDLSKKNPIAKIHSDLAEERGLKITYKYTGKGITEPPFGIFVFNKDTGELNVTSILDREETPFFLLTGYALDARGNNVEKPLELRIKVLDINDNEPVFTQDVFVGSVEELSAAHTLVMKINATDADEPNTLNSKISYRIVSLEPAYPPVFYLNKDTGEIYTTSVTLDREEHSSYTLTVEARDGNGEVTDKPVKQAQVQIRILDVNDNIPVVENKVLEGMVEENQVNVEVTRIKVFDADEIGSDNWLANFTFASGNEGGYFHIETDAQTNEGIVTLIKEVDYEEMKNLDFSVIVANKAAFHKSIRSKYKPTPIPIKVKVKNVKEGIHFKSSVISIYVSESMDRSSKGQIIGNFQAFDEDTGLPAHARYVKLEDRDNWISVDSVTSEIKLAKLPDFESRYVQNGTYTVKIVAISEDYPRKTITGTVLINVEDINDNCPTLIEPVQTICHDAEYVNVTAEDLDGHPNSGPFSFSVIDKPPGMAEKWKIARQESTSVLLQQSEKKLGRSEIQFLISDNQGFSCPEKQVLTLTVCECLHGSGCREAQHDSYVGLGPAAIALMILAFLLLLLVPLLLLMCHCGKGAKGFTPIPGTIEMLHPWNNEGAPPEDKVVPSFLPVDQGGSLVGRNGVGGMAKEATMKGSSSASIVKGQHEMSEMDGRWEEHRSLLSGRATQFTGATGAIMTTETTKTARATGASRDMAGAQAAAVALNEEFLRNYFTDKAASYTEEDENHTAKDCLLVYSQEETESLNASIGCCSFIEGELDDRFLDDLGLKFKTLAEVCLGQKIDINKEIEQRQKPATETSMNTASHSLCEQTMVNSENTYSSGSSFPVPKSLQEANAEKVTQEIVTERSVSSRQAQKVATPLPDPMASRNVIATETSYVTGSTMPPTTVILGPSQPQSLIVTERVYAPASTLVDQPYANEGTVVVTERVIQPHGGGSNPLEGTQHLQDVPYVMVRERESFLAPSSGVQPTLAMPNIAVGQNVTVTERVLAPASTLQSSYQIPTENSMTARNTTVSGAGVPGPLPDFGLEESGHSNSTITTSSTRVTKHSTVQHSYSXTAVSHKLTQSLISSD

SEQ ID NO: 931 - protein, 502 aa, Homo Sapiens
  misc_feature (493)..(493): Xaa can be any naturally occurring amino acid
MAPVGVEKKLLLGPNGPAVAAAGDLTSEEEEGQSLWSSILSEVSTRARSKLPSGKNILVFGEDGSGKTTLMTKLQGAEHGKKGRGLEYLYLSVHDEDRDDHTRCNVWILDGDLYHKGLLKFAVSAESLPETLVIFVADMSRPWTVMESLQKWASVLREHIDKMKIPPEKMRELERKFVKDFQDYMEPEEGCQGSPQRRGPLTSGSDEENVALPLGDNVLTHNLGIPVLVVCTKCDAVSVLEKEHDYRDEHLDFIQSHLRRFCLQYGAALIYTSVKEEKNLDLLYKYIVHKTYGFHFTTPALVVEKDAVFIPAGWDNEKKIAILHENFTTVKPEDAYEDFIVKPPVRKLVHDKELAAEDEQVFLMKQQSLLAKQPATPTRASESPARGPSGSPRTQGRGGPASVPSSSPGTSVKKPDPNIKNNAASEGVLASFFNSLLSKKTGSPGSPGAGGVQSTAKKSGQKTVLSNVQEELDRMTRKPDSMVTNSSTENEAXTSLKSAYVE

SEQ ID NO: 932 - protein, 583 aa, Homo Sapiens
  misc_feature (569)..(569): Xaa can be any naturally occurring amino acid
MKWKEKLGDGVYDTFMMIDETKCPPCSNVLCNPSEPPPPRRLNMTTEQFTGDHTQHFLDGGEMKVEQLFQEFGNRKSNTIQSDGISDSEKCSPTVSQGKSSDCLNTVKSNSSSKAPKVVPLTPEQALKQYKHHLTAYEKLEIINYPEIYFVGPNAKKRHGVIGGPNNGGYDDADGAYIHVPRDHLAYRYEVLKIIGKGSFGQVARVYDHKLRQYVALKMVRNEKRFHRQAAEEIRILEHLKKQDKTGSMNVIHMLESFTFRNHVCMAFELLSIDLYELIKKNKFQGFSVQLVRKFAQSILQSLDALHKNKIIHCDLKPENILLKHHGRSSTKVIDFGSSCFEYQKLYTYIQSRFYRAPEIILGSRYSTPIDIWSFGCILAELLTGQPLFPGEDEGDQLACMMELLGMPPPKLLEQSKRAKYFINSKGIPRYCSVTTQADGRVVLVGGRSRRGKKRGPPGSKDWGTALKGCDDYLFIEFLKRCLHWDPSARLTPAQALRHPWISKSVPRPLTTIDKVSGKRVVNPASAFQGLGSKLPPVVGIANKLKANLMSETNGSIPLCSVLPKLISXWTEICPEMHMCIFL

SEQ ID NO: 933 - protein, 603 aa, Homo Sapiens
  misc_feature (589)..(589): Xaa can be any naturally occurring amino acid
MGGTARGPGRKDAGPPGAGLPPQQRRLGDGVYDTFMMIDETKCPPCSNVLCNPSEPPPPRRLNMTTEQFTGDHTQHFLDGGEMKVEQLFQEFGNRKSNTIQSDGISDSEKCSPTVSQGKSSDCLNTVKSNSSSKAPKVVPLTPEQALKQYKHHLTAYEKLEIINYPEIYFVGPNAKKRHGVIGGPNNGGYDDADGAYIHVPRDHLAYRYEVLKIIGKGSFGQVARVYDHKLRQYVALKMVRNEKRFHRQAAEEIRILEHLKKQDKTGSMNVIHMLESFTFRNHVCMAFELLSIDLYELIKKNKFQGFSVQLVRKFAQSILQSLDALHKNKIIHCDLKPENILLKHHGRSSTKVIDFGSSCFEYQKLYTYIQSRFYRAPEIILGSRYSTPIDIWSFGCILAELLTGQPLFPGEDEGDQLACMMELLGMPPPKLLEQSKRAKYFINSKGIPRYCSVTTQADGRVVLVGGRSRRGKKRGPPGSKDWGTALKGCDDYLFIEFLKRCLHWDPSARLTPAQALRHPWISKSVPRPLTTIDKVSGKRVVNPASAFQGLGSKLPPVVGIANKLKANLMSETNGSIPLCSVLPKLISXWTEICPEMHMCIFL

SEQ ID NO: 934 - protein, 546 aa, Homo Sapiens
  misc_feature (541)..(541): Xaa can be any naturally occurring amino acid
MGTTARAALVLTYLAVASAASEGGFTATGQRQLRPEHFQEVGYAAPPSPPLSRSLPMDHPDSSQHGPPFEGQSQVQPPPSQEATPLQQEKLLPAQLPAEKEVGPPLPQEAVPLQKELPSLQHPNEQKEGTPAPFGDQSHPEPESWNAAQHCQQDRSQGGWGHRLDGFPPGRPSPDNLNQICLPNRQHVVYGPWNLPQSSYSHLTRQGETLNFLEIGYSRCCHCRSHTNRLECAKLVWEEAMSRFCEAEFSVKTRPHWCCTRQGEARFSCFQEEAPQPHYQLRACPSHQPDISSGLELPFPPGVPTLDNIKNICHLRRFRSVPRNLPATDPLQRELLALIQLEREFQRCCRQGNNHTCTWKAWEDTLDKYCDREYAVKTHHHLCCRHPPSPTRDECFARRAPYPNYDRDILTIDISRVTPNLMGHLCGNQRVLTKHKHIPGLIHNMTARCCDLPFPEQACCAEEEKLTFINDLCGPRRNIWRDPALCCYLSPGDEQVNCFNINYLRNVALVSGDTENAKGQGEQGSTGGTNISSTSEPKEEXVTPEP

SEQ ID NO: 935 - protein, 522 aa, Homo Sapiens
  misc_feature (494)..(494): Xaa can be any naturally occurring amino acid
MLKALFLTMLTLALVKSQDTEETITYTQCTDGYEWDPVRQQCKDIDECDIVPDACKGGMKCVNHYGGYLCLPKTAQIIVNNEQPQQETQPAEGTSGATTGVVAASSMATSGVLPGGGFVASAAAVAGPEMQTGRNNFVIRRNPADPQRIPSNPSHRIQCAAGYEQSEHNVCQDIDECTAGTHNCRADQVCINLRGSFACQCPPGYQKRGEQCVDIDECTIPPYCHQRCVNTPGSFYCQCSPGFQLAANNYTCVDINECDASNQCAQQCYNILGSFICQCNQGYELSSDRLNCEDIDECRTSSYLCQYQCVNEPGKFSCMCPQGYQVVRSRTCQDINECETTNECREDEMCWNYHGGFRCYPRNPCQDPYILTPENRCVCPVSNAMCRELPQSIVYKYMSIRSDRSVPSDIFQIQATTIYANTINTFRIKSGNENGEFYLRQTSPVSAMLVLVKSLSGPREHIVDLEMLTVSSIGTFRTSSVLRLTIIVGPFSFXSFLRVNHRHLSQPKNIVTLKHYFIYRYI

SEQ ID NO: 936 - protein, 457 aa, Homo Sapiens
  misc_feature (444)..(444): Xaa can be any naturally occurring amino acid
MLPCASCLPGSLLLWALLLLLLGSASPQDSEEPDSYTECTDGYEWDPDSQHCRDVNECLTIPEACKGEMKCINHYGGYLCLPRSAAVINDLHGEGPPPPVPPAQHPNPCPPGYEPDDQDSCVDVDECAQALHDCRPSQDCHNLPGSYQCTCPDGYRKIGPECVDIDECRYRYCQHRCVNLPGSFRCQCEPGFQLGPNNRSCVDVNECDMGAPCEQRCFNSYGTFLCRCHQGYELHRDGFSCSDIDECSYSSYLCQYRCINEPGRFSCHCPQGYQLLATRLCQDIDECESGAHQCSEAQTCVNFHGGYRCVDTNRCVEPYIQVSENRCLCPASNPLCREQPSSIVHRYMTITSERSVPADVFQIQATSVYPGAYNAFQIRAGNSQGDFYIRQINNVSAMLVLARPVTGPREYVLDLEMVTMNSLMSYRASSVLRLTVFVGAYTFXGAGGSHPPCSYPS

SEQ ID NO: 937 - protein, 830 aa, Homo Sapiens
  misc_feature (822)..(822): Xaa can be any naturally occurring amino acid
MPTRVCCCCSALRPRYKRLVDNIFPEDPKDGLVKTDMEKLTFYAVSAPEKLDRIGSYLAERLSRDVVRHRSGYVLIAMEALDQLLMACHSQSIKPFVESFLHMVAKLLESGEPKLQVLGTNSFVKFANIEEDTPSYHRRYDFFVSRFSAMCHSCHSDPEIRTEIRIAGIRGIQGVVRKTVNDELRATIWEPQHMDKIVPSLLFNMQKIEEVDSRIGPPSSPSATDKEENPAVLAENCFRELLGRATFGNMNNAVRPVFAHLDHHKLWDPNEFAVHCFKIIMYSIQAQYSHHVIQEILGHLDARKKDAPRVRAGIIQVLLEAVAIAAKGSIGPTVLEVFNTLLKHLRLSVEFEANDLQGGSVGSVNLNTSSKDNDEKIVQNAIIQTIGFFGSNLPDYQRSEIMMFIMGKVPVFGTSTHTLDISQLGDLGTRRIQIMLLRSLLMVTSGYKAKTIVTALPGSFLDPLLSPSLMEDYELRQLVLEVMHNLMDRHDNRAKLRGIRIIPDVADLKIKREKICRQDTSFMKKNGQQLYRHIYLGCKEEDNVQKNYELLYTSLALITIELANEEVVIDLIRLAIALQDSAIINEDNLPMFHRCGIMALVAAYLNFVSQMIAVPAFCQHVSKVIEIRTMEAPYFLPEHIFRDKCMLPKSLEKHEKDLYFLTNKIAESLGGSGYSVERLSVPYVPQVTDEDRLSRRKSIVDTVSIQVDILSNNVPSDDVVSNTEEITFEALKKAIDTSGMEEQEKEKRRLVIEKFQKAPFEEIAAQCESKANLLHDRLAQILELTIRPPPSPSGTLTITSGHAQYQSVPVYEMKFPDLCVYXSAHEDLRI

SEQ ID NO: 938 - protein, 592 aa, Homo Sapiens
  misc_feature (542)..(542): Xaa can be any naturally occurring amino acid
MFSWMGRQAGGRERAGGADAVQTVTGGLRSLYLRKVLPLEEAYRFHEFHSPALEDADFENKPMILLVGQYSTGKTTFIRYLLEQDFPGMRIGPEPTTDSFIAVMYGETEGSTPGNALVVDPKKPFRKLSRFGNAFLNRFMCSQLPNQVLKSISVIDSPGILSGEKQRISRGYDFCQVLQWFAERVDRIILLFDAHKLDISDEFSEAIKAFRGQDDKIRVVLNKADQVDTQQLMRVYGALMWSLGKVINTPEVLRVYIGSFWAQPLQNTDNRRLFEAEAQDLFRDIQSLPQKAAVRKLNDLIKRARLAKVHAYIISYLKKEMPSVFGKENKKRELISRLPEIYIQLQREYQISAGDFPEVKAMQEQLENYDFTKFHSLKPKLIEAVDNMLSNKISPLMNLISQEETSTPTQLVQGGAFDGTTEGPFNQGYGEGAKEGADEEEWVVAKDKPVYDELFYTLSPINGKISGVNAKKEMVTSKLPNSVLGKIWKLADCDCDGMLDEEEFALAKHLIKIKLDGYELPSSLPPHLVPPSHRKSLPKADXGVGCRTGWELGDLGLRPAPPLTHRMTLGKALPSLCLGFPICRMGRVDTGN

SEQ ID NO: 939 - protein, 929 aa, Homo Sapiens
  misc_feature (914)..(914): Xaa can be any naturally occurring amino acid
MSRFFTTGSDSESESSLSGEELVTKPVGGNYGKQPLLLSEDEEDTKRVVRSAKDKRFEELTNLIRTIRNAMKIRDVTKCLEEFELLGKAYGKAKSIVDKEGVPRFYIRILADLEDYLNELWEDKEGKKKMNKNNAKALSTLRQKIRKYNRDFESHITSYKQNPEQSADEDAEKNEEDSEGSSDEDEDEDGVSAATFLKKKSEAPSGESRKFLKKMDDEDEDSEDSEDDEDWDTGSTSSDSDSEEEEGKQTALASRFLKKAPTTDEDKKAAEKKREDKAKKKHDRKSKRLDEEEEDNEGGEWERVRGGVPLVKEKPKMFAKGTEITHAVVIKKLNEILQARGKKGTDRAAQIELLQLLVQIAAENNLGEGVIVKIKFNIIASLYDYNPNLATYMKPEMWGKCLDCINELMDILFANPNIFVGENILEESENLHNADQPLRVRGCILTLVERMDEEFTKIMQNTDPHSQEYVEHLKDEAQVCAIIERVQRYLEEKGTTEEVCRIYLLRILHTYYKFDYKAHQRQLTPPEGSSKSEQDQAENEGEDSAVLMERLCKYIYAKDRTDRIRTCAILCHIYHHALHSRWYQARDLMLMSHLQDNIQHADPPVQILYNRTMVQLGICAFRQGLTKDAHNALLDIQSSGRAKELLGQGLLLRSLQERNQEQEKVERRRQVPFHLHINLELLECVYLVSAMLLEIPYMAAHESDARRRMISKQFHHQLRVGERQPLLGPPESMREHVVAASKAMKMGDWKTCHSFIINEKMNGKVWDLFPEADKVRTMLVRKIQEESLRTYLFTYSSVYDSISMETLSDMFELDLPTVHSIISKMIINEELMASLDQPTQTVVMHRTEPTAQQNLALQLAEKLGSLVENNERVFDHKQGTYGGYFRDQKDGYRKNEGYMRRGGYRQQQSQTAYXALHSVSRLGHPTLKS

SEQ ID NO: 940 - protein, 1041 aa, Homo Sapiens
  misc_feature (1017)..(1017): Xaa can be any naturally occurring amino acid
MAPRTLWSCYLCCLLTAAAGAASYPPRGFSLYTGSSGALSPGGPQAQIAPRPASRHRNWCAYVVTRTVSCVLEDGVETYVKYQPCAWGQPQCPQSIMYRRFLRPRYRVAYKTVTDMEWRCCQGYGGDDCAESPAPALGPASSTPRPLARPARPNLSGSSAGSPLSGLGGEGPGESEKVQQLEEQVQSLTKELQGLRGVLQGLSGRLAEDVQRAVETAFNGRQQPADAAARPGVHETLNEIQHQLQLLDTRVSTHDQELGHLNNHHGGSSSSGGSRAPAPASAPPGPSEELLRQLEQRLQESCSVCLAGLDGFRRQQQEDRERLRAMEKLLASVEERQRHLAGLAVGRRPPQECCSPELGRRLAELERRLDVVAGSVTVLSGRRGTELGGAAGQGGHPPGYTSLASRLSRLEDRFNSTLGPSEEQEESWPGAPGGLSHWLPAARGRLEQLGGLLANVSGELGGRLDLLEEQVAGAMQACGQLCSGAPGEQDSQVSEILSALERRVLDSEGQLRLVGSGLHTVEAAGEARQATLEGLQEVVGRLQDRVDAQDETAAEFTLRLNLTAARLGQLEGLLQAHGDEGCGACGGVQEELGRLRDGVERCSCPLLPPRGPGAGPGVGGPSRGPLDGFSVFGGSSGSALQALQGELSEVILSFSSLNDSLNELQTTVEGQGADLADLGATKDRIISEINRLQQEATEHATESEERFRGLEEGQAQAGQCPSLEGRLGRLEGVCERLDTVAGGLQGLREGLSRHVAGLWAGLRETNTTSQMQAALLEKLVGGQAGLGRRLGALNSSLQLLEDRLHQLSLKDLTGPAGEAGPPGPPGLQGPPGPAGPPGSPGKDGQEGPIGPPGPQGEQGVEGAPAAPVPQVAFSAALSLPRSEPGTVPFDRVLLNDGGYYDPETGVFTAPLAGRYLLSAVLTGHRHEKVEAVLSRSNQGVARVDSGGYEPEGLENKPVAESQPSPGTLGVFSLILPLQAGDTVCVDLVMGQLAHSEEPLTIFSGALLYGDPELEHAXTGVPPDVSTSAEETAGAAGSWGLA

SEQ ID NO: 941 - protein, 1018 aa, Homo Sapiens
  misc_feature (1006)..(1006): Xaa can be any naturally occurring amino acid
MTTEVGSVSEVKKDSSQLGTDATKEKPKEVAENQQNQSSDPEEEKGSQPPPAAESQSSLRRQKREKETSESRGISRFIPPWLKKQKSYTLVVAKDGGDKKEPTQAVVEEQVLDKEEPLPEEQRQAKGDAEEMAQKKQEIKVEVKEEKPSVSKEEKPSVSKVEMQPTELVSKEREEKVKETQEDKLEGGAAKRETKEVQTNELKAEKASQKVTKKTKTVQCKVTLLDGTEYSCDLEKHAKGQVLFDKVCEHLNLLEKDYFGLLFQESPEQKNWLDPAKEIKRQLRNLPWLFTFNVKFYPPDPSQLTEDITRYFLCLQLRQDIASGRLPCSFVTHALLGSYTLQAELGDYDPEEHGSIDLSEFQFAPTQTKELEEKVAELHKTHRGLSPAQADSQFLENAKRLSMYGVDLHHAKDSEGVDIKLGVCANGLLIYKDRLRINRFAWPKILKISYKRSNFYIKVRPAELEQFESTIGFKLPNHRAAKRLWKVCVEHHTFYRLVSPEQPPKAKFLTLGSKFRYSGRTQAQTRQASTLIDRPAPHFERTSSKRVSRSLDGAPIGVMDQSLMKDFPGAAGEISAYGPGLVSIAVVQDGDGRREVRSPTKAPHLQLIEGKKNSLRVEGDNIYVRHSNLMLEELDKAQEDILKHQASISELKRNFMESTPEPRPNEWEKRRITPLSLQTQGSSHETLNIVEEKKRAEVGKDERVITEEMNGKEISPGSGPGEIRKVEPVTQKDSTSLSSESSSSSSESEEEDVGEYRPHHRVTEGTIREEQEYEEEVEEEPRPAAKVVEREEAVPEASPVTQAGASVITVETVIQENVGAQKIPGEKSVHEGALKQDMGEEAEEEPQKVNGEVSHVDIDVLPQIICCSEPPVVKTEMVTISDASQRTEISTKEVPIVQTETKTITYESPQIDGGAGGDSGTLLTAQTITSESVSTTTTTHITKTVKGGISETRIEKRIVITGDGDIDHDQALAQAIREAREQHPDMSVTRVVVHKETELAEEGEDXVRKSFFKQHSTL

SEQ ID NO: 942 - protein, 925 aa, Homo Sapiens
  misc_feature (897)..(897): Xaa can be any naturally occurring amino acid
MAAAAQLSLTQLSSGNPVYEKYYRQVDTGNTGRVLASDAAAFLKKSGLPDLILGKIWDLADTDGKGILNKQEFFVALRLVACAQNGLEVSLSSLNLAVPPPRFHDTSSPLLISGTSAAELPWAVKPEDKAKYDAIFDSLSPVNGFLSGDKVKPVLLNSKLPVDILGRVWELSDIDHDGMLDRDEFAVAMFLVYCALEKEPVPMSLPPALVPPSKRKTWVVSPAEKAKYDEIFLKTDKDMDGFVSGLEVREIFLKTGLPSTLLAHIWSLCDTKDCGKLSKDQFALAFHLISQKLIKGIDPPHVLTPEMIPPSDRASLQKNIIGSSPVADFSAIKELDTLNNEIVDLQREKNNVEQDLKEKEDTIKQRTSEVQDLQDEVQRENTNLQKLQAQKQQVQELLDELDEQKAQLEEQLKEVRKKCAEEAQLISSLKAELTSQESQISTYEEELAKAREELSRLQQETAELEESVESGKAQLEPLQQHLQDSQQEISSMQMKLMEMKDLENHNSQLNWCSSPHSILVNGATDYCSLSTSSSETANLNEHVEGQSNLESEPIHQESPARSSPELLPSGVTDENEVTTAVTEKVCSELDNNRHSKEEDPFNVDSSSLTGPVADTNLDFFQSDPFVGSDPFKDDPFGKIDPFGGDPFKGSDPFASDCFFRQSTDPFATSSTDPFSAANNSSITSVETLKHNDPFAPGGTVVAASDSATDPFASVFGNESFGGGFADFSTLSKVNNEDPFRSATSSSVSNVVITKNVFEETSVKSEDEPPALPPKIGTPTRPCPLPPGKRSINKLDSPDPFKLNDPFQPFPGNDSPKEKDPEIFCDPFTSATTTTNKEADPSNFANFSAYPSEEDMIEWAKRESEREEEQRLARLNQQEQEDLELAIALSKSEISEAXRILLFFGNNIVFFFLNTETIYNVYQNYL

SEQ ID NO: 943 - protein, 876 aa, Homo Sapiens
  misc_feature (823)..(823): Xaa can be any naturally occurring amino acid
MNGHISNHPSSFGMYPSQMNGYGSSPTFSQTDREHGSKTSAKALYEQRKNYARDSVSSVSDISQYRVEHLTTFVLDRKDAMITVDDGIRKLKLLDAKGKVWTQDMILQVDDRAVSLIDLESKNELENFPLNTIQHCQAVMHSCSYDSVLALVCKEPTQNKPDLHLFQCDEVKANLISEDIESAISDSKGGKQKRRPDALRMISNADPSIPPPPRAPAPAPPGTVTQVDVRSRVAAWSAWAADQGDFEKPRQYHEQEETPEMMAARIDRDVQILNHILDDIEFFITKLQKAAEAFSELSKRKKNKKGKRKGPGEGVLTLRAKPPPPDEFLDCFQKFKHGFNLLAKLKSHIQNPSAADLVHFLFTPLNMVVQATGGPELASSVLSPLLNKDTIDFLNYTVNGDERQLWMSLGGTWMKARAEWPKEQFIPPYVPRFRNGWEPPMLNFMGATMEQDLYQLAESVANVAEHQRKQEIKRLSTEHSSVSEYHPADGYAFSSNIYTRGSHLDQGEAAVAFKPTSNRHIDRNYEPLKTQPKKYAKSKYDFVARNNSELSVLKDDILEILDDRKQWWKVRNASGDSGFVPNNILDIVRPPESGLGRADPPYTHTIQKQRMEYGPRPADTPPAPSPPPTPAPVPVPLPPSTPAPVPVSKVPANITRQNSSSSDSGGSIVRDSQRHKQLPVDRRKSQMEEVQDELIHRLTIGRSAAQKKFHVPRQNVPVINITYDSTPEDVKTWLQSKGFNPVTVNSLGVLNGAQLFSLNKDELRTVCPEGARVYSQITVQKAALEDSSGSSELQEIMRRRQEKISAAASDSGVESFDEGSSHXFVCLYLNSIVFGIIPTCFVLRSLEGNVRFIFLDVIYHHKKKTHANLSEHRICF

SEQ ID NO: 944 - protein, 869 aa, Homo Sapiens
  misc_feature (847)..(847): Xaa can be any naturally occurring amino acid
MGIQGLLQFIKEASEPIHVRKYKGQVVAVDTYCWLHKGAIACAEKLAKGEPTDRYVGFCMKFVNMLLSHGIKPILVFDGCTLPSKKEVERSRRERRQANLLKGKQLLREGKVSEARECFTRSINITHAMAHKVIKAARSQGVDCLVAPYEADAQLAYLNKAGIVQAIITEDSDLLAFGCKKVILKMDQFGNGLEIDQARLGMCRQLGDVFTEEKFRYMCILSGCDYLSSLRGIGLAKACKVLRLANNPDIVKVIKKIGHYLKMNITVPEDYINGFIRANNTFLYQLVFDPIKRKLIPLNAYEDDVDPETLSYAGQYVDDSIALQIALGNKDINTFEQIDDYNPDTAMPAHSRSHSWDDKTCQKSANVSSIWHRNYSPRPESGTVSDAPQLKENPSTVGVERVISTKGLNLPRKSSIVKRPRSAELSEDDLLSQYSLSFTKKTKKNSSEGNKSLSFSEVFVPDLVNGPTNKKSVSTPPRTRNKFATFLQRKNEESGAVVVPGTRSRFFCSSDSTDCVSNKVSIQPLDETAVTDKENNLHESEYGDQEGKRLVDTDVARNSSDDIPNNHIPGDHIPDKATVFTDEESYSFESSKFTRTISPPTLGTLRSCFSWSGGLGDFSRTPSPSPSTALQQFRRKSDSPTSLPENNMSDVSQLKSEESSDDESHPLREGACSSQSQESGEFSLQSSNASKLSQCSSKDSDSEESDCNIKLLDSQSDQTSKLCLSHFSKKDTPLRNKVPGLYKSSSADSLSTTKIKPLGPARASGLSKKPASIQKRKHHNAENKPGLQIKLNELWKNFGFKKDSEKLPPCKKPLSPVRDNIQLTPEAEEDIFNKPECGRVQRAIFQXMQTAAKLLPARESDQFEVPVWE

SEQ ID NO: 945 - protein, 783 aa, Homo Sapiens
  misc_feature (752)..(752): Xaa can be any naturally occurring amino acid
MGQTGKKSEKGPVCWRKRVKSEYMRLRQLKRFRRADEVKSMFSSNRQKILERTEILNQEWKQRRIQPVHILTSVSSLRGTRECSVTSDLDFPTQVIPLKTLNAVASVPIMYSWSPLQQNFMVEDETVLHNIPYMGDEVLDQDGTFIEELIKNYDGKVHGDRECGFINDEIFVELVNALGQYNDDDDDDDGDDPEEREEKQKDLEDHRDDKESRPPRKFPSDKIFEAISSMFPDKGTAEELKEKYKELTEQQLPGALPPECTPNIDGPNAKSVQREQSLHSFHTLFCRRCFKYDCFLHRKCNYSFHATPNTYKRKNTETALDNKPCGPQCYQHLEGAKEFAAALTAERIKTPPKRPGGRRRGRLPNNSSRPSTPTINVLESKDTDSDREAGTETGGENNDKEEEEKKDETSSSSEANSRCQTPIKMKPNIEPPENVEWSGAEASMFRVLIGTYYDNFCAIARLIGTKTCRQVYEFRVKESSIIAPAPAEDVDTPPRKKKRKHRLWAAHCRKIQLKKDGSSNHVYNYQPCDHPRQPCDSSCPCVIAQNFCEKFCQCSSECQNRFPGCRCKAQCNTKQCPCYLAVRECDPDLCLTCGAADHWDSKNVSCKNCSIQRGSKKHLLLAPSDVAGWGIFIKDPVQKNEFISEYCGEIISQDEADRRGKVYDKYMCSFLFNLNNDFVVDATRKGNKIRFANHSVNPNCYAKVMMVNGDHRIGIFAKRAIQTGEELFFDYRYSQADALKYVGIEREMEIPXHLLPPPPSSETAALASGTSSTVGNLEKEHAV

SEQ ID NO: 946 - protein, 646 aa, Homo Sapiens
  misc_feature (626)..(626): Xaa can be any naturally occurring amino acid
MIFLYQVVHFILFTSVSGECVTQLLKDTCFEGGDITTVFTPSAKYCQVVCTYHPRCLLFTFTAESPSEDPTRWFTCVLKDSVTETLPRVNRTAAISGYSFKQCSHQISACNKDIYVDLDMKGINYNSSVAKSAQECQERCTDDVHCHFFTYATRQFPSLEHRNICLLKHTQTGTPTRITKLDKVVSGFSLKSCALSNLACIRDIFPNTVFADSNIDSVMAPDAFVCGRICTHHPGCLFFTFFSQEWPKESQRNLCLLKTSESGLPSTRIKKSKALSGFSLQSCRHSIPVFCHSSFYHDTDFLGEELDIVAAKSHEACQKLCTNAVRCQFFTYTPAQASCNEGKGKCYLKLSSNGSPTKILHGRGGISGYTLRLCKMDNECTTKIKPRIVGGTASVRGEWPWQVTLHTTSPTQRHLCGGSIIGNQWILTAAHCFYGVESPKILRVYSGILNQSEIKEDTSFFGVQEIIIHDQYKMAESGYDIALLKLETTVNYTDSQRPICLPSKGDRNVIYTDCWVTGWGYRKLRDKIQNTLQKAKIPLVTNEECQKRYRGHKITHKMICAGYREGGKDACKGDSGGPLSCKHNEVWHLVGITSWGEGCAQRERPGVYTNVVEYVDWILEKTQAVXMGSQGPLESLKDPGFAGRGC

SEQ ID NO: 947 - protein, 497 aa, Homo Sapiens
  misc_feature (467)..(467): Xaa can be any naturally occurring amino acid
MVSQALRLLCLLLGLQGCLAAGGVAKASGGETRDMPWKPGPHRVFVTQEEAHGVLHRRRRANAFLEELRPGSLERECKEEQCSFEEAREIFKDAERTKLFWISYSDGDQCASSPCQNGGSCKDQLQSYICFCLPAFEGRNCETHKDDQLICVNENGGCEQYCSDHTGTKRSCRCHEGYSLLADGVSCTPTVEYPCGKIPILEKRNASKPQGRIVGGKVCPKGECPWQVLLLVNGAQLCGGTLINTIWVVSAAHCFDKIKNWRNLIAVLGEHDLSEHDGDEQSRRVAQVIIPSTYVPGTTNHDIALLRLHQPVVLTDHVVPLCLPERTFSERTLAFVRFSLVSGWGQLLDRGATALELMVLNVPRLMTQDCLQQSRKVGDSPNITEYMFCAGYSDGSKDSCKGDSGGPHATHYRGTWYLTGIVSWGQGCATVGHFGVYTRVSQYIEWLQKLMRSEPRPGVLLRAPFPXPSSPGLWRESQGCVELSWHQIPYILLQLMG

SEQ ID NO: 948 - protein, 2385 aa, Homo Sapiens
  misc_feature (2352)..(2352): Xaa can be any naturally occurring amino acid
MQIELSTCFFLCLLRFCFSATRRYYLGAVELSWDYMQSDLGELPVDARFPPRVPKSFPFNTSVVYKKTLFVEFTDHLFNIAKPRPPWMGLLGPTIQAEVYDTVVITLKNMASHPVSLHAVGVSYWKASEGAEYDDQTSQREKEDDKVFPGGSHTYVWQVLKENGPMASDPLCLTYSYLSHVDLVKDLNSGLIGALLVCREGSLAKEKTQTLHKFILLFAVFDEGKSWHSETKNSLMQDRDAASARAWPKMHTVNGYVNRSLPGLIGCHRKSVYWHVIGMGTTPEVHSIFLEGHTFLVRNHRQASLEISPITFLTAQTLLMDLGQFLLFCHISSHQHDGMEAYVKVDSCPEEPQLRMKNNEEAEDYDDDLTDSEMDVVRFDDDNSPSFIQIRSVAKKHPKTWVHYIAAEEEDWDYAPLVLAPDDRSYKSQYLNNGPQRIGRKYKKVRFMAYTDETFKTREAIQHESGILGPLLYGEVGDTLLIIFKNQASRPYNIYPHGITDVRPLYSRRLPKGVKHLKDFPILPGEIFKYKWTVTVEDGPTKSDPRCLTRYYSSFVNMERDLASGLIGPLLICYKESVDQRGNQIMSDKRNVILFSVFDENRSWYLTENIQRFLPNPAGVQLEDPEFQASNIMHSINGYVFDSLQLSVCLHEVAYWYILSIGAQTDFLSVFFSGYTFKHKMVYEDTLTLFPFSGETVFMSMENPGLWILGCHNSDFRNRGMTALLKVSSCDKNTGDYYEDSYEDISAYLLSKNNAIEPRSFSQNSRHPSTRQKQFNATTIPENDIEKTDPWFAHRTPMPKIQNVSSSDLLMLLRQSPTPHGLSLSDLQEAKYETFSDDPSPGAIDSNNSLSEMTHFRPQLHHSGDMVFTPESGLQLRLNEKLGTTAATELKKLDFKVSSTSNNLISTIPSDNLAAGTDNTSSLGPPSMPVHYDSQLDTTLFGKKSSPLTESGGPLSLSEENNDSKLLESGLMNSQESSWGKNVSSTESGRLFKGKRAHGPALLTKDNALFKVSISLLKTNKTSNNSATNRKTHIDGPSLLIENSPSVWQNILESDTEFKKVTPLIHDRMLMDKNATALRLNHMSNKTTSSKNMEMVQQKKEGPIPPDAQNPDMSFFKMLFLPESARWIQRTHGKNSLNSGQGPSPKQLVSLGPEKSVEGQNFLSEKNKVVVGKGEFTKDVGLKEMVFPSSRNLFLTNLDNLHENNTHNQEKKIQEEIEKKETLIQENVVLPQIHTVTGTKNFMKNLFLLSTRQNVEGSYDGAYAPVLQDFRSLNDSTNRTKKHTAHFSKKGEEENLEGLGNQTKQIVEKYACTTRISPNTSQQNFVTQRSKRALKQFRLPLEETELEKRIIVDDTSTQWSKNMKHLTPSTLTQIDYNEKEKGAITQSPLSDCLTRSHSIPQANRSPLPIAKVSSFPSIRPIYLTRVLFQDNSSHLPAASYRKKDSGVQESSHFLQGAKKNNLSLAILTLEMTGDQREVGSLGTSATNSVTYKKVENTVLPKPDLPKTSGKVELLPKVHIYQKDLFPTETSNGSPGHLDLVEGSLLQGTEGAIKWNEANRPGKVPFLRVATESSAKTPSKLLDPLAWDNHYGTQIPKEEWKSQEKSPEKTAFKKKDTILSLNACESNHAIAAINEGQNKPEIEVTWAKQGRTERLCSQNPPVLKRHQREITRTTLQSDQEEIDYDDTISVEMKKEDFDIYDEDENQSPRSFQKKTRHYFIAAVERLWDYGMSSSPHVLRNRAQSGSVPQFKKVVFQEFTDGSFTQPLYRGELNEHLGLLGPYIRAEVEDNIMVTFRNQASRPYSFYSSLISYEEDQRQGAEPRKNFVKPNETKTYFWKVQHHMAPTKDEFDCKAWAYFSDVDLEKDVHSGLIGPLLVCHTNTLNPAHGRQVTVQEFALFFTIFDETKSWYFTENMERNCRAPCNIQMEDPTFKENYRFHAINGYIMDTLPGLVMAQDQRIRWYLLSMGSNENIHSIHFSGHVFTVRKKEEYKMALYNLYPGVFETVEMLPSKAGIWRVECLIGEHLHAGMSTLFLVYSNKCQTPLGMASGHIRDFQITASGQYGQWAPKLARLHYSGSINAWSTKEPFSWIKVDLLAPMIIHGIKTQGARQKFSSLYISQFIIMYSLDGKKWQTYRGNSTGTLMVFFGNVDSSGIKHNIFNPPIIARYIRLHPTHYSIRSTLRMELMGCDLNSCSMPLGMESKAISDAQITASSYFTNMFATWSPSKARLHLQGRSNAWRPQVNNPKEWLQVDFQKTMKVTGVTTQGVKSLLTSMYVKEFLISSSQDGHQWTLFFQNGKVKVFQGNQDSFTPVVNSLDPPLLTRYLRIHPQSWVHQIALRMEVLGCEAQDLYXGWPLQHLPLPSPLPPQLQGSVPPWLAFYLCAKS

SEQ ID NO: 949 - protein, 194 aa, Homo Sapiens
  misc_feature (134)..(134): Xaa can be any naturally occurring amino acid
MVDAFLGTWKLVDSKNFDDYMKSLGVGFATRQVASMTKPTTIIEKNGDILTLKTHSTFKNTEISFKLGVEFDETTADDRKVKSIVTLDGGKLVHLQKWDGQETTLVRELIDGKLILTLTHGTAVCTRTYEKEAXPDCTVADYYSANRLPLDSAPHCLISSSAFCTNPRILLGSGATDRDPVPVPMVYVVFFFFF

SEQ ID NO: 950 - protein, 455 aa, Homo Sapiens
  misc_feature (420)..(420): Xaa can be any naturally occurring amino acid
MSFIPVAEDSDFPIHNLPYGVFSTRGDPRPRIGVAIGDQILDLSIIKHLFTGPVLSKHQDVFNQPTLNSFMGLGQAAWKEARVFLQNLLSVSQARLRDDTELRKCAFISQASATMHLPATIGDYTDFYSSRQHATNVGIMFRDKENALMPNWLHLPVGYHGRASSVVVSGTPIRRPMGQMKPDDSKPPVYGACKLLDMELEMAFFVGPGNRLGEPIPISKAHEHIFGMVLMNDWSARDIQKWEYVPLGPFLGKSFGTTVSPWVVPMDALMPFAVPNPKQDPRPLPYLCHDEPYTFDINLSVNLKGEGMSQAATICKSNFKYMYWTMLQQLTHHSVNGCNLRPGDLLASGTISGPEPENFGSMLELSWKGTKPIDLGNGQTRKFLLDGDEVIITGYCQGDGYRIGFGQCAGKVLPALLPSXDFLCSSGNKGLKHPFQPCDWGPPSGCRPGPPFSDK

SEQ ID NO: 951 - protein, 482 aa, Homo Sapiens
  misc_feature (455)..(455): Xaa can be any naturally occurring amino acid
MERKDFETWLDNISVTFLSLTDLQKNETLDHLISLSGAVQLRHLSNNLETLLKRDFLKLLPLELSFYLLKWLDPQTLLTCCLVSKQWNKVISACTEVWQTACKNLGWQIDDSVQDALHWKKVYLKAILRMKQLEDHEAFETSSLIGHSARVYALYYKDGLLCTGSDDLSAKLWDVSTGQCVYGIQTHTCAAVKFDEQKLVTGSFDNTVACWEWSSGARTQHFRGHTGAVFSVDYNDELDILVSGSADFTVKVWALSAGTCLNTLTGHTEWVTKVVLQKCKVKSLLHSPGDYILLSADKYEIKIWPIGREINCKCLKTLSVSEDRSICLQPRLHFDGKYIVCSSALGLYQWDFASYDILRVIKTPEIANLALLGFGDIFALLFDNRYLYIMDLRTESLISRWPLPEYRKSKRGSSFLAGEASWLNGLDGHNDTGLVFATSMPDHSIHLVLWKEHGXHHEPPPLTDFGCRGCGFWVQPLRQPTA

SEQ ID NO: 952 - protein, 622 aa, Homo Sapiens
  misc_feature (567)..(567): Xaa can be any naturally occurring amino acid
MDEGGTPLLPDSLVYQIFLSLGPADVLAAGLVCRQWQAVSRDEFLWREQFYRYYQVARDVPRHPAAMSWYEEFQRLYDTVPCVEVQTLREHTDQVLHLSFSHSGYQFASCSKDCTVKIWSNDLTISLLHSADMRPYNWSYTQFSQFNKDDSLLLASGVFLGPHNSSSGEIAVISLDSFALLSRVRNKPYDVFGCWLTETSLISGNLHRIGDITSCSVLWLNNAFQDVESENVNVVKRLFKIQNLNASTVRTVMVADCSRFDSPDLLLEAGDPATSPCRIFDLGSDNEEVVAGPAPAHAKEGLRHFLDRVLEGRAQPQLSERMLETKVAELLAQGHTKPPERSATGAKSKYLIFTTGCLTYSPHQIGIKQILPHQMTTAGPVLGEGRGSDAFFDALDHVIDIHGHIIGMGLSPDNRYLYVNSRAWPNGAVVADPMQPPPIAEEIDLLVFDLKTMREVRRALRAHRAYTPNDECFFIFLDVSRDFVASGAEDRHGYIWDRHYNICLARLRHEDVVNSVVFSPQEQELLLTASDDATIKAWRSPRTMRVLQAPRPRPRTFFSWLASQRRXGVLGALEPPGPLEDIARLCGFFPSGRGGDAYSSYALGRGQPGPATRSHTNLLTQL

SEQ ID NO: 953 - protein, 337 aa, Homo Sapiens
  misc_feature (327)..(327): Xaa can be any naturally occurring amino acid
MELSGATMARGLAVLLVLFLHIKNLPAQAADTCPEVKVVGLEGSDKLTILRGCPGLPGAPGPKGEAGVIGERGERGLPGAPGKAGPVGPKGDRGEKGMRGEKGDAGQSQSCATGPRNCKDLLDRGYFLSGWHTIYLPDCRPLTVLCDMDTDGGGWTVFQRRMDGSVDFYRDWAAYKQGFGSQLGEFWLGNDNIHALTAQGSSELRVDLVDFEGNHQFAKYKSFKVADEAEKYKLVLGAFVGGSAGNSLTGHNNNFFSTKDQDNDVSSSNCAEKFQGAWWYADCHASNLNGLYLMGPHESYANGINWSAAKGYKYSYKVSEMKVRPAXTGQDPSTCTC

SEQ ID NO: 954 - protein, 338 aa, Homo Sapiens
  misc_feature (300)..(300): Xaa can be any naturally occurring amino acid
MDLLWILPSLWLLLLGGPACLKTQEHPSCPGPRELEASKVVLLPSCPGAPGSPGEKGAPGPQGPPGPPGKMGPKGEPGDPVNLLRCQEGPRNCRELLSQGATLSGWYHLCLPEGRALPVFCDMDTEGGGWLVFQRRQDGSVDFFRSWSSYRAGFGNQESEFWLGNENLHQLTLQGNWELRVELEDFNGNRTFAHYATFRLLGEVDHYQLALGKFSEGTAGDSLSLHSGRPFTTYDADHDSSNSNCAVIVHGAWWYASCYRSNLNGRYAVSEAAAHKYGIDWASGRGVGHPYRRVRMMLRXGTLAASALISPVQLPDRQPPCLCQPPLLACPHLKIKSF

SEQ ID NO: 955 - protein, 327 aa, Homo Sapiens
  misc_feature (289)..(289): Xaa can be any naturally occurring amino acid
MDLLWILPSLWLLLLGGPACLKTQEHPSCPGPRELEASKVVLLPSCPGAPGSPGEKGAPGPQGPPGPPGKMGPKGEPGPRNCRELLSQGATLSGWYHLCLPEGRALPVFCDMDTEGGGWLVFQRRQDGSVDFFRSWSSYRAGFGNQESEFWLGNENLHQLTLQGNWELRVELEDFNGNRTFAHYATFRLLGEVDHYQLALGKFSEGTAGDSLSLHSGRPFTTYDADHDSSNSNCAVIVHGAWWYASCYRSNLNGRYAVSEAAAHKYGIDWASGRGVGHPYRRVRMMLRXGTLAASALISPVQLPDRQPPCLCQPPLLACPHLKIKSF

SEQ ID NO: 956 - protein, 423 aa, Homo Sapiens
  misc_feature (418)..(418): Xaa can be any naturally occurring amino acid
MEFVKCLGHPEEFYNLVRFRIGGKRKVMPKMDQDSLSSSLKTCYKYLNQTSRSFAAVIQALDGEMRNAVCIFYLVLRALDTLEDDMTISVEKKVPLLHNFHSFLYQPDWRFMESKEKDRQVLEDFPTISLEFRNLAEKYQTVIADICRRMGIGMAEFLDKHVTSEQEWDKYCHYVAGLVGIGLSRLFSASEFEDPLVGEDTERANSMGLFLQKTNIIRDYLEDQQGGREFWPQEVWSRYVKKLGDFAKPENIDLAVQCLNELITNALHHIPDVITYLSRLRNQSVFNFCAIPQVMAIATLAACYNNQQVFKGAVKIRKGQAVTLMMDATNMPAVKAIIYQYMEEIYHRIPDSDPSSSKTRQIISTIRTQNLPNCQLISRSHYSPIYLSFVMLLAALSWQYLTTLSQVTEDYVQTGEHXSQICP

SEQ ID NO: 957 - protein, 2106 aa, Homo Sapiens
  misc_feature (2062)..(2062): Xaa can be any naturally occurring amino acid
MLRVIVESASNIPKTKFGKPDPIVSVIFKDEKKKTKKVDNELNPVWNEILEFDLRGIPLDFSSSLGIIVKDFETIGQNKLIGTATVALKDLTGDQSRSLPYKLISLLNEKGQDTGATIDLVIGYDPPSAPHPNDLSGPSVPGMGGDGEEDEGDEDRLDNAVRGPGPKGPVGTVSEAQLARRLTKVKNSRRMLSNKPQDFQIRVRVIEGRQLSGNNIRPVVKVHVCGQTHRTRIKRGNNPFFDELFFYNVNMTPSELMDEIISIRVYNSHSLRADCLMGEFKIDVGFVYDEPGHAVMRKWLLLNDPEDTSSGSKGYMKVSMFVLGTGDEPPPERRDRDNDSDDVESNLLLPAGIALRWVTFLLKIYRAEDIPQMDDAFSQTVKEIFGGNADKKNLVDPFVEVSFAGKKVCTNIIEKNANPEWNQVVNLQIKFPSVCEKIKLTIYDWDRLTKNDVVGTTYLHLSKIAASGGEVEDFSSSGTGAASYTVNTGETEVGFVPTFGPCYLNLYGSPREYTGFPDPYDELNTGKGEGVAYRGRILVELATFLEKTPPDKKLEPISNDDLLVVEKYQRRRKYSLSAVFHSATMLQDVGEAIQFEVSIGNYGNKFDTTCKPLASTTQYSRAVFDGNYYYYLPWAHTKPVVTLTSYWEDISHRLDAVNTLLAMAERLQTNIEALKSGIQGKIPANQLAELWLKLIDEVIEDTRYTLPLTEGKANVTVLDTQIRKLRSRSLSQIHEAAVRMRSEATDVKSTLAEIEDWLDKLMQLTEEPQNSMPDIIIWMIRGEKRLAYARIPAHQVLYSTSGENASGKYCGKTQTIFLKYPQEKNNGPKVPVELRVNIWLGLSAVEKKFNSFAEGTFTVFAEMYENQALMFGKWGTSGLVGRHKFSDVTGKIKLKREFFLPPKGWEWEGEWIVDPERSLLTEADAGHTEFTDEVYQNESRYPGGDWKPAEDTYTDANGDKAASPSELTCPPGWEWEDDAWSYDINRAVDEKGWEYGITIPPDHKPKSWVAAEKMYHTHRRRRLVRKRKKDLTQTASSTARAMEELQDQEGWEYASLIGWKFHWKQRSSDTFRRRRWRRKMAPSETHGAAAIFKLEGALGADTTEDGDEKSLEKQKHSATTVFGANTPIVSCNFDRVYIYHLRCYVYQARNLLALDKDSFSDPYAHICFLHRSKTTEIIHSTLNPTWDQTIIFDEVEIYGEPQTVLQNPPKVIMELFDNDQVGKDEFLGRSIFSPVVKLNSEMDITPKLLWHPVMNGDKACGDVLVTAELILRGKDGSNLPILPPQRAPNLYMVPQGIRPVVQLTAIEILAWGLRNMKNFQMASITSPSLVVECGGERVESVVIKNLKKTPNFPSSVLFMKVFLPKEELYMPPLVIKVIDHRQFGRKPVVGQCTIERLDRFRCDPYAGKEDIVPQLKASLLSAPPCRDIVIEMEDTKPLLASKLTEKEEEIVDWWSKFYASSGEHEKCGQYIQKGYSKLKIYNCELENVAEFEGLTDFSDTFKLYRGKSDENEDPSVVGEFKGSFRIYPLPDDPSVPAPPRQFRELPDSVPQECTVRIYIVRGLELQPQDNNGLCDPYIKITLGKKVIEDRDHYIPNTLNPVFGRMYELSCYLPQEKDLKISVYDYDTFTRDEKVGETIIDLENRFLSRFGSHCGIPEEYCVSGVNTWRDQLRPTQLLQNVARFKGFPQPILSEDGSRIRYGGRDYSLDEFEANKILHQHLGAPEERLALHILRTQGLVPEHVETRTLHSTFQPNISQGKLQMWVDVFPKSLGPPGPPFNITPRKAKKYYLRVIIWNTKDVILDEKSITGEEMSDIYVKGWIPGNEENKQKTDVHYRSLDGEGNFNWRFVFPFDYLPAEQLCIVAKKEHFWSIDQTEFRIPPRLIIQIWDNDKFSLDDYLGFLELDLRHTIIPAKSPEKCRLDMIPDLKAMNPLKAKTASLFEQKSMKGWWPCYAEKDGARVMAGKVEMTLEILNEKEADERPAGKGRDEPNMNPKLDLPNRPETSFLWFTNPCKTMKFIVWRRFKWVIIGLLFLLILLLFVAVLLYSLPNYLSMKIVKPNVXQRQRLHFKSHPAMRESCLCRPTSSVILCLRPHPSSRLRHVTEPH

SEQ ID NO: 958 - protein, 2093 aa, Homo Sapiens
  misc_feature (2049)..(2049): Xaa can be any naturally occurring amino acid
MLRVIVESASNIPKTKFGKPDPIVSVIFKDEKKKTKKVDNELNPVWNEILEFDLRGIPLDFSSSLGIIVKDFETIGQNKLIGTATVALKDLTGDQSRSLPYKLISLLNEKGQDTGATIDLVIGYDPPSAPHPNDLSGPSVPGMGGDGEEDEGDEDRLDNAVRGPGPKGPVGTVSEAQLARRLTKVKNSRRMLSNKPQDFQIRVRVIEGRQLSGNNIRPVVKVHVCGQTHRTRIKRGNNPFFDELFFYNVNMTPSELMDEIISIRVYNSHSLRADCLMGEFKIDVGFVYDEPGHAVMRKWLLLNDPEDTSSGSKGYMKVSMFVLGTGDEPPPERRDRDNDSDDVESNLLLPAGIALRWVTFLLKIYRAEDIPQMDDAFSQTVKEIFGGNADKKNLVDPFVEVSFAGKKVCTNIIEKNANPEWNQVVNLQIKFPSVCEKIKLTIYDWDRLTKNDVVGTTYLHLSKIAASGGEVEVNTGETEVGFVPTFGPCYLNLYGSPREYTGFPDPYDELNTGKGEGVAYRGRILVELATFLEKTPPDKKLEPISNDDLLVVEKYQRRRKYSLSAVFHSATMLQDVGEAIQFEVSIGNYGNKFDTTCKPLASTTQYSRAVFDGNYYYYLPWAHTKPVVTLTSYWEDISHRLDAVNTLLAMAERLQTNIEALKSGIQGKIPANQLAELWLKLIDEVIEDTRYTLPLTEGKANVTVLDTQIRKLRSRSLSQIHEAAVRMRSEATDVKSTLAEIEDWLDKLMQLTEEPQNSMPDIIIWMIRGEKRLAYARIPAHQVLYSTSGENASGKYCGKTQTIFLKYPQEKNNGPKVPVELRVNIWLGLSAVEKKFNSFAEGTFTVFAEMYENQALMFGKWGTSGLVGRHKFSDVTGKIKLKREFFLPPKGWEWEGEWIVDPERSLLTEADAGHTEFTDEVYQNESRYPGGDWKPAEDTYTDANGDKAASPSELTCPPGWEWEDDAWSYDINRAVDEKGWEYGITIPPDHKPKSWVAAEKMYHTHRRRRLVRKRKKDLTQTASSTARAMEELQDQEGWEYASLIGWKFHWKQRSSDTFRRRRWRRKMAPSETHGAAAIFKLEGALGADTTEDGDEKSLEKQKHSATTVFGANTPIVSCNFDRVYIYHLRCYVYQARNLLALDKDSFSDPYAHICFLHRSKTTEIIHSTLNPTWDQTIIFDEVEIYGEPQTVLQNPPKVIMELFDNDQVGKDEFLGRSIFSPVVKLNSEMDITPKLLWHPVMNGDKACGDVLVTAELILRGKDGSNLPILPPQRAPNLYMVPQGIRPVVQLTAIEILAWGLRNMKNFQMASITSPSLVVECGGERVESVVIKNLKKTPNFPSSVLFMKVFLPKEELYMPPLVIKVIDHRQFGRKPVVGQCTIERLDRFRCDPYAGKEDIVPQLKASLLSAPPCRDIVIEMEDTKPLLASKLTEKEEEIVDWWSKFYASSGEHEKCGQYIQKGYSKLKIYNCELENVAEFEGLTDFSDTFKLYRGKSDENEDPSVVGEFKGSFRIYPLPDDPSVPAPPRQFRELPDSVPQECTVRIYIVRGLELQPQDNNGLCDPYIKITLGKKVIEDRDHYIPNTLNPVFGRMYELSCYLPQEKDLKISVYDYDTFTRDEKVGETIIDLENRFLSRFGSHCGIPEEYCVSGVNTWRDQLRPTQLLQNVARFKGFPQPILSEDGSRIRYGGRDYSLDEFEANKILHQHLGAPEERLALHILRTQGLVPEHVETRTLHSTFQPNISQGKLQMWVDVFPKSLGPPGPPFNITPRKAKKYYLRVIIWNTKDVILDEKSITGEEMSDIYVKGWIPGNEENKQKTDVHYRSLDGEGNFNWRFVFPFDYLPAEQLCIVAKKEHFWSIDQTEFRIPPRLIIQIWDNDKFSLDDYLGFLELDLRHTIIPAKSPEKCRLDMIPDLKAMNPLKAKTASLFEQKSMKGWWPCYAEKDGARVMAGKVEMTLEILNEKEADERPAGKGRDEPNMNPKLDLPNRPETSFLWFTNPCKTMKFIVWRRFKWVIIGLLFLLILLLFVAVLLYSLPNYLSMKIVKPNVXQRQRLHFKSHPAMRESCLCRPTSSVILCLRPHPSSRLRHVTEPH

SEQ ID NO: 959 - protein, 372 aa, Homo Sapiens
  misc_feature (354)..(354): Xaa can be any naturally occurring amino acid
MAADGDWQDFYEFQEPARSLLDQENCNASPEPGAEAGAEAGGGADGFPAPACSLEEKLSLCFRPSDPGAEPPRTAVRPITERSLLQGDEIWNALTDNYGNVMPVDWKSSHTRTLHLLTLNLSEKGVSDSLLFDTSDDEELREQLDMHSIIVSCVNDEPLFTADQVIEEIEEMMQESPDPEDDETPTQSDRLSMLSQEIQTLKRSSTGSYEERVKRLSVSELNEILEEIETAIKEYSEELVQQLALRDELEFEKEVKNSFISVLIEVQNKQKEHKETAKKKKKLKNGSSQNGKNERSHMPGTYLTTVIPYEKKNGPPSVEDLQILTKILRAMKEDSEKVPSLLTDYILKVLCPTXSSNFICGGLQARFPTALF

SEQ ID NO: 960 - protein, 330 aa, Homo Sapiens
  misc_feature (313)..(313): Xaa can be any naturally occurring amino acid
MAKVFSFILVTTALTMGREISALEDCAQEQMRLRAQVRLLETRVKQQQVKIKQLLQENEVQFLDKGDENTVIDLGSKRQYADCSEIFNDGYKLSGFYKIKPLQSPAEFSVYCDMSDGGGWTVIQRRSDGSENFNRGWKDYENGFGNFVQKHGEYWLGNKNLHFLTTQEDYTLKIDLADFEKNSRYAQYKNFKVGDEKNFYELNIGEYSGTAGDSLAGNFHPEVQWWASHQRMKFSTWDRDHDNYEGNCAEEDQSGWWFNRCHSANLNGVYYSGPYTAKTDNGIVWYTWHGWWYSLKSVVMKIRPNDFIPNVIXLLLLGFRFCNSALFKVI

SEQ ID NO: 961 - protein, 2720 aa, Homo Sapiens
  misc_feature (2640)..(2640): Xaa can be any naturally occurring amino acid
MSSSHSRAGQSAAGAAPGGGVDTRDAEMPATEKDLAEDAPWKKIQQNTFTRWCNEHLKCVSKRIANLQTDLSDGLRLIALLEVLSQKKMHRKHNQRPTFRQMQLENVSVALEFLDRESIKLVSIDSKAIVDGNLKLILGLIWTLILHYSISMPMWDEEEDEEAKKQTPKQRLLGWIQNKLPQLPITNFSRDWQSGRALGALVDSCAPGLCPDWDSWDASKPVTNAREAMQQADDWLGIPQVITPEEIVDPNVDEHSVMTYLSQFPKAKLKPGAPLRPKLNPKKARAYGPGIEPTGNMVKKRAEFTVETRSAGQGEVLVYVEDPAGHQEEAKVTANNDKNRTFSVWYVPEVTGTHKVTVLFAGQHIAKSPFEVYVDKSQGDASKVTAQGPGLEPSGNIANKTTYFEIFTAGAGTGEVEVVIQDPMGQKGTVEPQLEARGDSTYRCSYQPTMEGVHTVHVTFAGVPIPRSPYTVTVGQACNPSACRAVGRGLQPKGVRVKETADFKVYTKGAGSGELKVTVKGPKGEERVKQKDLGDGVYGFEYYPMVPGTYIVTITWGGQNIGRSPFEVKVGTECGNQKVRAWGPGLEGGVVGKSADFVVEAIGDDVGTLGFSVEGPSQAKIECDDKGDGSCDVRYWPQEAGEYAVHVLCNSEDIRLSPFMADIRDAPQDFHPDRVKARGPGLEKTGVAVNKPAEFTVDAKHGGKAPLRVQVQDNEGCPVEALVKDNGNGTYSCSYVPRKPVKHTAMVSWGGVSIPNSPFRVNVGAGSHPNKVKVYGPGVAKTGLKAHEPTYFTVDCAEAGQGDVSIGIKCAPGVVGPAEADIDFDIIRNDNDTFTVKYTPRGAGSYTIMVLFADQATPTSPIRVKVEPSHDASKVKAEGPGLSRTGVELGKPTHFTVNAKAAGKGKLDVQFSGLTKGDAVRDVDIIDHHDNTYTVKYTPVQQGPVGVNVTYGGDPIPKSPFSVAVSPSLDLSKIKVSGLGEKVDVGKDQEFTVKSKGAGGQGKVASKIVGPSGAAVPCKVEPGLGADNSVVRFLPREEGPYEVEVTYDGVPVPGSPFPLEAVAPTKPSKVKAFGPGLQGGSAGSPARFTIDTKGAGTGGLGLTVEGPCEAQLECLDNGDGTCSVSYVPTEPGDYNINILFADTHIPGSPFKAHVVPCFDASKVKCSGPGLERATAGEVGQFQVDCSSAGSAELTIEICSEAGLPAEVYIQDHGDGTHTITYIPLCPGAYTVTIKYGGQPVPNFPSKLQVEPAVDTSGVQCYGPGIEGQGVFREATTEFSVDARALTQTGGPHVKARVANPSGNLTETYVQDRGDGMYKVEYTPYEEGLHSVDVTYDGSPVPSSPFQVPVTEGCDPSRVRVHGPGIQSGTTNKPNKFTVETRGAGTGGLGLAVEGPSEAKMSCMDNKDGSCSVEYIPYEAGTYSLNVTYGGHQVPGSPFKVPVHDVTDASKVKCSGPGLSPGMVRANLPQSFQVDTSKAGVAPLQVKVQGPKGLVEPVDVVDNADGTQTVNYVPSREGPYSISVLYGDEEVPRSPFKVKVLPTHDASKVKASGPGLNTTGVPASLPVEFTIDAKDAGEGLLAVQITDPEGKPKKTHIQDNHDGTYTVAYVPDVTGRYTILIKYGGDEIPFSPYRVRAVPTGDASKCTVTGAGIGPTIQIGEETVITVDTKAAGKGKVTCTVCTPDGSEVDVDVVENEDGTFDIFYTAPQPGKYVICVRFGGEHVPNSPFQVTALAGDQPSVQPPLRSQQLAPQYTYAQGGQQTWAPERPLVGVNGLDVTSLRPFDLVIPFTIKKGEITGEVRMPSGKVAQPTITDNKDGTVTVRYAPSEAGLHEMDIRYDNMHIPGSPLQFYVDYVNCGHVTAYGPGLTHGVVNKPATFTVNTKDAGEGGLSLAIEGPSKAEISCTDNQDGTCSVSYLPVLPGDYSILVKYNEQHVPGSPFTARVTGDDSMRMSHLKVGSAADIPINISETDLSLLTATVVPPSGREEPCLLKRLRNGHVGISFVPKETGEHLVHVKKNGQHVASSPIPVVISQSEIGDASRVRVSGQGLHEGHTFEPAEFIIDTRDAGYGGLSLSIEGPSKVDINTEDLEDGTCRVTYCPTEPGNYIINIKFADQHVPGSPFSVKVTGEGRVKESITRRRRAPSVANVGSHCDLSLKIPEISIQDMTAQVTSPSGKTHEAEIVEGENHTYCIRFVPAEMGTHTVSVKYKGQHVPGSPFQFTVGPLGEGGAHKVRAGGPGLERAEAGVPAEFSIWTREAGAGGLAIAVEGPSKAEISFEDRKDGSCGVAYVVQEPGDYEVSVKFNEEHIPDSPFVVPVASPSGDARRLTVSSLQESGLKVNQPASFAVSLNGAKGAIDAKVHSPSGALEECYVTEIDQDKYAVRFIPRENGVYLIDVKFNGTHIPGSPFKIRVGEPGHGGDPGLVSAYGAGLEGGVTGNPAEFVVNTSNAGAGALSVTIDGPSKVKMDCQECPEGYRVTYTPMAPGSYLISIKYGGPYHIGGSPFKAKVTGPRLVSNHSLHETSSVFVDSLTKATCAPQHGAPGPGPADASKVVAKGLGLSKAYVGQKSSFTVDCSKAGNNMLLVGVHGPRTPCEEILVKHVGSRLYSVSYLLKDKGEYTLVVKWGDEHIPGSPYRVVVPXVWGPCQPAAPKPAPLPKQPRPLPLNPGPGRPGRPPVTAAAPALCRAALTCLPSQPLTSRLSLGQREPFGGAACLLWFWEG

SEQ ID NO: 962 - protein, 535 aa, Homo Sapiens
  misc_feature (472)..(472): Xaa can be any naturally occurring amino acid
MAKKVAVIGAGVSGLISLKCCVDEGLEPTCFERTEDIGGVWRFKENVEDGRASIYQSVVTNTSKEMSCFSDFPMPEDFPNFLHNSKLLEYFRIFAKKFDLLKYIQFQTTVLSVRKCPDFSSSGQWKVVTQSNGKEQSAVFDAVMVCSGHHILPHIPLKSFPGMERFKGQYFHSRQYKHPDGFEGKRILVIGMGNSGSDIAVELSKNAAQVFISTRHGTWVMSRISEDGYPWDSVFHTRFRSMLRNVLPRTAVKWMIEQQMNRWFNHENYGLEPQNKYIMKEPVLNDDVPSRLLCGAIKVKSTVKELTETSAIFEDGTVEENIDVIIFATGYSFSFPFLEDSLVKVENNMVSLYKYIFPAHLDKSTLACIGLIQPLGSIFPTAELQARWVTRVFKGLCSLPSERTMMMDIIKRNEKRIDLFGESQSQTLQTNYVDYLDELALEIGAKPDFCSLLFKDPKLAVRLYFGPCNSYXYRLVGPGQWEGARNAIFTQKQRILKPLKTRALKDSSNFSVSFLLKILGLLAVVVAFFCQLQWS

SEQ ID NO: 963 - protein, 513 aa, Homo Sapiens
  misc_feature (506)..(506): Xaa can be any naturally occurring amino acid
MSNICQRLWEYLEPYLPCLSTEADKSTVIENPGALCSPQSQRHGHYFVALFDYQARTAEDLSFRAGDKLQVLDTLHEGWWFARHLEKRRDGSSQQLQGYIPSNYVAEDRSLQAEPWFFGAIGRSDAEKQLLYSENKTGSFLIRESESQKGEFSLSVLDGAVVKHYRIKRLDEGGFFLTRRRIFSTLNEFVSHYTKTSDGLCVKLGKPCLKIQVPAPFDLSYKTVDQWEIDRNSIQLLKRLGSGQFGEVWEGLWNNTTPVAVKTLKPGSMDPNDFLREAQIMKNLRHPKLIQLYAVCTLEDPIYIITELMRHGSLQEYLQNDTGSKIHLTQQVDMAAQVASGMAYLESRNYIHRDLAARNVLVGEHNIYKVADFGLARVFKVDNEDIYESRHEIKLPVKWTAPEAIRSNKFSIKSDVWSFGILLYEIITYGKMPYSGMTGAQVIQMLAQNYRLPQPSNCPQQFYNIMLECWNAEPKERPTFETLRWKLEDYFETDSSYSDANNFIRXTLEKNIK

SEQ ID NO: 964 - protein, 297 aa, Homo Sapiens
  misc_feature (264)..(264): Xaa can be any naturally occurring amino acid
MRPGAPGPLWPLPWGALAWAVGFVSSMGSGNPAPGGVCWLQQGQEATCSLVLQTDVTRAECCASGNIDTAWSNLTHPGNKINLLGFLGLVHCLPCKDSCDGVECGPGKACRMLGGRPRCECAPDCSGLPARLQVCGSDGATYRDECELRAARCRGHPDLSVMYRGRCRKSCEHVVCPRPQSCVVDQTGSAHCVVCRAAPCPVPSSPGQELCGNNNVTYISSCHMRQATCFLGRSIGVRHAGSCAGTPEEPPGGESAEEEENFVXACRTGLGLVPEAPHHPLLFIATAESNLYATDTP

SEQ ID NO: 965 - protein, 378 aa, Homo Sapiens
  misc_feature (360)..(360): Xaa can be any naturally occurring amino acid
MDPLGPAKPQWSWRCCLTTLLFQLLMAVCFFSYLRVSQDDPTVYPNGSRFPDSTGTPAHSIPLILLWTWPFNKPIALPRCSEMVPGTADCNITADRKVYPQADAVIVHHREVMYNPSAQLPRSPRRQGQRWIWFSMESPSHCWQLKAMDGYFNLTMSYRSDSDIFTPYGWLEPWSGQPAHPPLNLSAKTELVAWAVSNWGPNSARVRYYQSLQAHLKVDVYGRSHKPLPQGTMMETLSRYKFYLAFENSLHPDYITEKLWRNALEAWAVPVVLGPSRSNYERFLPPDAFIHVDDFQSPKDLARYLQELDKDHARYLSYFRWRETLRPRSFSWALAFCKACWKLQEESRYQTRGIAAWFTXEAGVGPGLPGTSFSWGLT

SEQ ID NO: 966 - protein, 589 aa, Homo Sapiens
  misc_feature (538)..(538): Xaa can be any naturally occurring amino acid
MGCVQCKDKEATKLTEERDGSLNQSSGYRYGTDPTPQHYPSFGVTSIPNYNNFHAAGGQGLTVFGGVNSSSHTGTLRTRGGTGVTLFVALYDYEARTEDDLSFHKGEKFQILNSSEGDWWEARSLTTGETGYIPSNYVAPVDSIQAEEWYFGKLGRKDAERQLLSFGNPRGTFLIRESETTKGAYSLSIRDWDDMKGDHVKHYKIRKLDNGGYYITTRAQFETLQQLVQHYSERAAGLCCRLVVPCHKGMPRLTDLSVKTKDVWEIPRESLQLIKRLGNGQFGEVWMGTWNGNTKVAIKTLKPGTMSPESFLEEAQIMKKLKHDKLVQLYAVVSEEPIYIVTEYMNKGSLLDFLKDGEGRALKLPNLVDMAAQVAAGMAYIERMNYIHRDLRSANILVGNGLICKIADFGLARLIEDNEYTARQGAKFPIKWTAPEAALYGRFTIKSDVWSFGILLTELVTKGRVPYPGMNNREVLEQVERGYRMPCPQDCPISLHELMIHCWKKDPEERPTFEYLQSFLEDYFTATEPQYQPGENLXGPGLRREALSQRLPHPSPLAFNSVASCSPAAEPPRIRLHVTLKLTNFHGPH

SEQ ID NO: 967 - protein, 586 aa, Homo Sapiens
  misc_feature (535)..(535): Xaa can be any naturally occurring amino acid
MGCVQCKDKEATKLTEERDGSLNQSSGYRYGTDPTPQHYPSFGVTSIPNYNNFHAAGGQGLTVFGGVNSSSHTGTLRTRGGTGVTLFVALYDYEARTEDDLSFHKGEKFQILNSSEGDWWEARSLTTGETGYIPSNYVAPVDSIQAEEWYFGKLGRKDAERQLLSFGNPRGTFLIRESETTKGAYSLSIRDWDDMKGDHVKHYKIRKLDNGGYYITTRAQFETLQQLVQHYSEKADGLCFNLTVIASSCTPQTSGLAKDAWEVARRSLCLEKKLGQGCFAEVWLGTWNGNTKVAIKTLKPGTMSPESFLEEAQIMKKLKHDKLVQLYAVVSEEPIYIVTEYMNKGSLLDFLKDGEGRALKLPNLVDMAAQVAAGMAYIERMNYIHRDLRSANILVGNGLICKIADFGLARLIEDNEYTARQGAKFPIKWTAPEAALYGRFTIKSDVWSFGILLTELVTKGRVPYPGMNNREVLEQVERGYRMPCPQDCPISLHELMIHCWKKDPEERPTFEYLQSFLEDYFTATEPQYQPGENLXGPGLRREALSQRLPHPSPLAFNSVASCSPAAEPPRIRLHVTLKLTNFHGPH

SEQ ID NO: 968 - protein, 534 aa, Homo Sapiens
  misc_feature (483)..(483): Xaa can be any naturally occurring amino acid
MGCVQCKDKEATKLTEERDGSLNQSSGYRYGTDPTPQHYPSFGVTSIPNYNNFHAAGGQGLTVFGGVNSSSHTGTLRTRGGTGVTLFVALYDYEARTEDDLSFHKGEKFQILNSSEGDWWEARSLTTGETGYIPSNYVAPVDSIQAEEWYFGKLGRKDAERQLLSFGNPRGTFLIRESETTKGAYSLSIRDWDDMKGDHVKHYKIRKLDNGGYYITTRAQFETLQQLVQHYSGTWNGNTKVAIKTLKPGTMSPESFLEEAQIMKKLKHDKLVQLYAVVSEEPIYIVTEYMNKGSLLDFLKDGEGRALKLPNLVDMAAQVAAGMAYIERMNYIHRDLRSANILVGNGLICKIADFGLARLIEDNEYTARQGAKFPIKWTAPEAALYGRFTIKSDVWSFGILLTELVTKGRVPYPGMNNREVLEQVERGYRMPCPQDCPISLHELMIHCWKKDPEERPTFEYLQSFLEDYFTATEPQYQPGENLXGPGLRREALSQRLPHPSPLAFNSVASCSPAAEPPRIRLHVTLKLTNFHGPH

SEQ ID NO: 969 - protein, 473 aa, Homo Sapiens
  misc_feature (455)..(455): Xaa can be any naturally occurring amino acid
MTKREAEELIEIEIDGTEKAECTEESIVEQTYAPAECVSQAIDINEPIGNLKKLLEPRLQCSLDAHEICLQDIQLDPERSLFDQGVKTDGTVQLSVQVISYQGIEPKLNILEIVKPADTVEVVIDPDAHHAESEAHLVEEAQVITLDGTKHITTISDETSEQVTRWAAALEGYRKEQERLGIPYDPIQWSTDQVLHWVVWVMKEFSMTDIDLTTLNISGRELCSLNQEDFFQRVPRGEILWSHLELLRKYVLASQEQQMNEIVTIDQPVQIIPASVQSATPTTIKVINSSAKAAKVQRAPRISGEDRSSPGNRTGNNGQIQLWQFLLELLTDKDARDCISWVGDEGEFKLNQPELVAQKWGQRKNKPTMNYEKLSRALRYYYDGDMICKVQGKRFVYKFVCDLKTLIGYSAAELNRLVTECEQKKLAKMQLHGIAQPVTAVALATASLQTEKDNXAPGHSETPKSFLKCLEQV

SEQ ID NO: 970 - protein, 136 aa, Homo Sapiens
  misc_feature (124)..(124): Xaa can be any naturally occurring amino acid
MARGSALLLASLLLAAALSASAGLWSPAKEKRGWTLNSAGYLLGPHAVGNHRSFSDKNGLTSKRELRPEDDMKPGSFDRSIPENNIMRTIIEFLSFLHLKEAGALDRLLDLPAAASSEDIERSXEPPGHVCLCAVT

SEQ ID NO: 971 - protein, 610 aa, Homo Sapiens
  misc_feature (560)..(560): Xaa can be any naturally occurring amino acid
MRKFAYCKVVLATSLIWVLLDMFLLLYFSECNKCDEKKERGLPAGDVLEPVQKPHEGPGEMGKPVVIPKEDQEKMKEMFKINQFNLMASEMIALNRSLPDVRLEGCKTKVYPDNLPTTSVVIVFHNEAWSTLLRTVHSVINRSPRHMIEEIVLVDDASERDFLKRPLESYVKKLKVPVHVIRMEQRSGLIRARLKGAAVSKGQVITFLDAHCECTVGWLEPLLARIKHDRRTVVCPIIDVISDDTFEYMAGSDMTYGGFNWKLNFRWYPVPQREMDRRKGDRTLPVRTPTMAGGLFSIDRDYFQEIGTYDAGMDIWGGENLEISFRIWQCGGTLEIVTCSHVGHVFRKATPYTFPGGTGQIINKNNRRLAEVWMDEFKNFFYIISPGVTKVDYGDISSRVGLRHKLQCKPFSWYLENIYPDSQIPRHYFSLGEIRNVETNQCLDNMARKENEKVGIFNCHGMGGNQVFSYTANKEIRTDDLCLDVSKLNGPVTMLKCHHLKGNQLWEYDPVKLTLQHVNSNQCLDKATEEDSQVPSIRDCNGSRSQQWLLRNVTLPEIFXDQIYKKTKKIRIDWATSAYISATFLSSKKGKVLSSSAGCKVYQPLKLRLL

SEQ ID NO: 972 - protein, 601 aa, Homo Sapiens
  misc_feature (593)..(593): Xaa can be any naturally occurring amino acid
MASEIHMTGPMCLIENTNGRLMANPEALKILSAITQPMVVVAIVGLYRTGKSYLMNKLAGKKKGFSLGSTVQSHTKGIWMWCVPHPKKPGHILVLLDTEGLGDVEKGDNQNDSWIFALAVLLSSTFVYNSIGTINQQAMDQLYYVTELTHRIRSKSSPDENENEVEDSADFVSFFPDFVWTLRDFSLDLEADGQPLTPDEYLTYSLKLKKGTSQKDETFNLPRLCIRKFFPKKKCFVFDRPVHRRKLAQLEKLQDEELDPEFVQQVADFCSYIFSNSKTKTLSGGIQVNGPRLESLVLTYVNAISSGDLPCMENAVLALAQIENSAAVQKAIAHYEQQMGQKVQLPTESLQELLDLHRDSEREAIEVFIRSSFKDVDHLFQKELAAQLEKKRDDFCKQNQEASSDRCSGLLQVIFSPLEEEVKAGIYSKPGGYRLFVQKLQDLKKKYYEEPRKGIQAEEILQTYLKSKESMTDAILQTDQTLTEKEKEIEVERVKAESAQASAKMLQEMQRKNEQMMEQKERSYQEHLKQLTEKMENDRVQLLKEQERTLALKLQEQEQLLKEGFQKESRIMKNEIQDLQTKMRRRKACTISXRPEPSCHP

SEQ ID NO: 973 - protein, 461 aa, Homo Sapiens
  misc_feature (420)..(420): Xaa can be any naturally occurring amino acid
MWPGNAWRAALFWVPRGRRAQSALAQLRGILEGELEGIRGAGTWKSERVITSRQGPHIRVDGVSGGILNFCANNYLGLSSHPEVIQAGLQALEEFGAGLSSVRFICGTQSIHKNLEAKIARFHQREDAILYPSCYDANAGLFEALLTPEDAVLSDELNHASIIDGIRLCKAHKYRYRHLDMADLEAKLQEAQKHRLRLVATDGAFSMDGDIAPLQEICCLASRYGALVFMDECHATGFLGPTGRGTDELLGVMDQVTIINSTLGKALGGASGGYTTGPGPLVSLLRQRARPYLFSNSLPPAVVGCASKALDLLMGSNTIVQSMAAKTQRFRSKMEAAGFTISGASHPICPVMLGDARLASRMADDMLKRGIFVIGFSYPVVPKGKARIRVQISAVHSEEDIDRCVEAFVEVGRLHGALPXALGKDEKSQGPPTATGSKEVFDQPRPEALSPEPKSQSWAGT

SEQ ID NO: 974 - protein, 200 aa, Homo Sapiens
  misc_feature (181)..(181): Xaa can be any naturally occurring amino acid
MKSIYFVAGLFVMLVQGSWQRSLQDTEEKSRSFSASQADPLSDPDQMNEDKRHSQGTFTSDYSKYLDSRRAQDFVQWLMNTKRNRNNIAKRHDEFERHAEGTFTSDVSSYLEGQAAKEFIAWLVKGRGRRDFPEEVAIVEELGRRHADGSFSDEMNTILDNLAARDFINWLIQTKITDRKXLYHYSRSSSQHHLLATWDV

SEQ ID NO: 975 - protein, 504 aa, Homo Sapiens
  misc_feature (478)..(478): Xaa can be any naturally occurring amino acid
MPPCQPQRPLLLLLLLLACQPQVPSAQVMDFLFEKWKLYGDQCHHNLSLLPPPTELVCNRTFDKYSCWPDTPANTTANISCPWYLPWHHKVQHRFVFKRCGPDGQWVRGPRGQPWRDASQCQMDGEEIEVQKEVAKMYSSFQVMYTVGYSLSLGALLLALAILGGLSKLHCTRNAIHANLFASFVLKASSVLVIDGLLRTRYSQKIGDDLSVSTWLSDGAVAGCRVAAVFMQYGIVANYCWLLVEGLYLHNLLGLATLPERSFFSLYLGIGWGAPMLFVVPWAVVKCLFENVQCWTSNDNMGFWWILRFPVFLAILINFFIFVRIVQLLVAKLRARQMHHTDYKFRLAKSTLTLIPLLGVHEVVFAFVTDEHAQGTLRSAKLFFDLFLSSFQGLLVAVLYCFLNKEVQSELRRRWHRWRLGKVLWEERNTSNHRASSSPGHGPPSKELQFGRGGGSQDSSAETPLAGGLPRLAESPFXTLLGPQLGLDSGTQRRRWTTQNWTPS

SEQ ID NO: 976 - protein, 609 aa, Homo Sapiens
  misc_feature (466)..(466): Xaa can be any naturally occurring amino acid
MLDDRARMEAAKKEKVEQILAEFQLQEEDLKKVMRRMQKEMDRGLRLETHEEASVKMLPTYVRSTPEGSEVGDFLSLDLGGTNFRVMLVKVGEGEEGQWSVKTKHQMYSIPEDAMTGTAEMLFDYISECISDFLDKHQMKHKKLPLGFTFSFPVRHEDIDKGILLNWTKGFKASGAEGNNVVGLLRDAIKRRGDFEMDVVAMVNDTVATMISCYYEDHQCEVGMIVGTGCNACYMEEMQNVELVEGDEGRMCVNTEWGAFGDSGELDEFLLEYDRLVDESSANPGQQLYEKLIGGKYMGELVRLVLLRLVDENLLFHGEASEQLRTRGAFETRFVSQVESDTGDRKQIYNILSTLGLRPSTTDCDIVRRACESVSTRAAHMCSAGLAGVINRMRESRSEDVMRITVGVDGSVYKLHPSFKERFHASVRRLTPSCEITFIESEEGSGRGAALVSAVACKKACMLGQXEQWPQAQGGCHSPTAPRLHGEVLPTRARSLAGQEAWPCQDPGRLPYRWGTERASSLSFSVGQPQGPNGGAAGAGTETLEAPHLSRWNQFPRRELLTQDFDAFPHCQSCWPRLGPGSGKGCPLDPAVASLPWELILCGEAAPTA

SEQ ID NO: 977 - protein, 610 aa, Homo Sapiens
  misc_feature (467)..(467): Xaa can be any naturally occurring amino acid
MAMDVTRSQAQTALTLVEQILAEFQLQEEDLKKVMRRMQKEMDRGLRLETHEEASVKMLPTYVRSTPEGSEVGDFLSLDLGGTNFRVMLVKVGEGEEGQWSVKTKHQMYSIPEDAMTGTAEMLFDYISECISDFLDKHQMKHKKLPLGFTFSFPVRHEDIDKGILLNWTKGFKASGAEGNNVVGLLRDAIKRRGDFEMDVVAMVNDTVATMISCYYEDHQCEVGMIVGTGCNACYMEEMQNVELVEGDEGRMCVNTEWGAFGDSGELDEFLLEYDRLVDESSANPGQQLYEKLIGGKYMGELVRLVLLRLVDENLLFHGEASEQLRTRGAFETRFVSQVESDTGDRKQIYNILSTLGLRPSTTDCDIVRRACESVSTRAAHMCSAGLAGVINRMRESRSEDVMRITVGVDGSVYKLHPSFKERFHASVRRLTPSCEITFIESEEGSGRGAALVSAVACKKACMLGQXEQWPQAQGGCHSPTAPRLHGEVLPTRARSLAGQEAWPCQDPGRLPYRWGTERASSLSFSVGQPQGPNGGAAGAGTETLEAPHLSRWNQFPRRELLTQDFDAFPHCQSCWPRLGPGSGKGCPLDPAVASLPWELILCGEAAPTA

SEQ ID NO: 978 - protein, 608 aa, Homo Sapiens
  misc_feature (465)..(465): Xaa can be any naturally occurring amino acid
MPRPRSQLPQPNSQVEQILAEFQLQEEDLKKVMRRMQKEMDRGLRLETHEEASVKMLPTYVRSTPEGSEVGDFLSLDLGGTNFRVMLVKVGEGEEGQWSVKTKHQMYSIPEDAMTGTAEMLFDYISECISDFLDKHQMKHKKLPLGFTFSFPVRHEDIDKGILLNWTKGFKASGAEGNNVVGLLRDAIKRRGDFEMDVVAMVNDTVATMISCYYEDHQCEVGMIVGTGCNACYMEEMQNVELVEGDEGRMCVNTEWGAFGDSGELDEFLLEYDRLVDESSANPGQQLYEKLIGGKYMGELVRLVLLRLVDENLLFHGEASEQLRTRGAFETRFVSQVESDTGDRKQIYNILSTLGLRPSTTDCDIVRRACESVSTRAAHMCSAGLAGVINRMRESRSEDVMRITVGVDGSVYKLHPSFKERFHASVRRLTPSCEITFIESEEGSGRGAALVSAVACKKACMLGQXEQWPQAQGGCHSPTAPRLHGEVLPTRARSLAGQEAWPCQDPGRLPYRWGTERASSLSFSVGQPQGPNGGAAGAGTETLEAPHLSRWNQFPRRELLTQDFDAFPHCQSCWPRLGPGSGKGCPLDPAVASLPWELILCGEAAPTA

SEQ ID NO: 979 - protein, 178 aa, Homo Sapiens
  misc_feature (174)..(174): Xaa can be any naturally occurring amino acid
MALRVVRSVRALLCTLRAVPSPAAPCPPRPWQLGVGAVRTLRTGPALLSVRKFTEKHEWVTTENGIGTVGISNFAQEALGDVVYCSLPEVGTKLNKQDEFGALESVKAASELYSPLSGEVTEINEALAENPGLVNKSCYEDGWLIKMTLSNPSELDELMSEEAYEKYIKSIEEXKWNS

SEQ ID NO: 980 - protein, 539 aa, Homo Sapiens
  misc_feature (502)..(502): Xaa can be any naturally occurring amino acid
MRLPKLLTFLLWYLAWLDLEFICTVLGAPDLGQRPQGTRPGLAKAEAKERPPLARNVFRPGGHSYGGGATNANARAKGGTGQTGGLTQPKKDEPKKLPPRPGGPEPKPGHPPQTRQATARTVTPKGQLPGGKAPPKAGSVPSSFLLKKAREPGPPREPKEPFRPPPITPHEYMLSLYRTLSDADRKGGNSSVKLEAGLANTITSFIDKGQDDRGPVVRKQRYVFDISALEKDGLLGAELRILRKKPSDTAKPAAPGGGRAAQLKLSSCPSGRQPASLLDVRSVPGLDGSGWEVFDIWKLFRNFKNSAQLCLELEAWERGRAVDLRGLGFDRAARQVHEKALFLVFGRTKKRDLFFNEIKARSGQDDKTVYEYLFSQRRKRRAPLATRQGKRPSKNLKARCSRKALHVNFKDMGWDDWIIAPLEYEAFHCEGLCEFPLRSHLEPTNHAVIQTLMNSMDPESTPPTCCVPTRLSPISILFIDSANNVVYKQYEDMVVESCGCRXQHWPSVFLGGTSQEPLPALLESQRGQEAVAGASTQLG

SEQ ID NO: 981 - protein, 465 aa, Homo Sapiens
  misc_feature (433)..(433): Xaa can be any naturally occurring amino acid
MERRRITSAARRSYVSSGEMMVGGLAPGRRLGPGTRLSLARMPPPLPTRVDFSLAGALNAGFKETRASERAEMMELNDRFASYIEKVRFLEQQNKALAAELNQLRAKEPTKLADVYQAELRELRLRLDQLTANSARLEVERDNLAQDLATVRQKLQDETNLRLEAENNLAAYRQEADEATLARLDLERKIESLEEEIRFLRKIHEEEVRELQEQLARQQVHVELDVAKPDLTAALKEIRTQYEAMASSNMHEAEEWYRSKFADLTDAAARNAELLRQAKHEANDYRRQLQSLTCDLESLRGTNESLERQMREQEERHVREAASYQEALARLEEEGQSLKDEMARHLQEYQDLLNVKLALDIEIATYRKLLEGEENRITIPVQTFSNLQIRETSLDTKSVSEGHLKRNIVVKTVEMRDGEVIKESKQEHKDVMXGRTHLVASAPSHEGPEQKQDSCSASAGTFPQT

SEQ ID NO: 982 - protein, 707 aa, Homo Sapiens
  misc_feature (682)..(682): Xaa can be any naturally occurring amino acid
MCGIFAYLNYHVPRTRREILETLIKGLQRLEYRGYDSAGVGFDGGNDKDWEANACKTQLIKKKGKVKALDEEVHKQQDMDLDIEFDVHLGIAHTRWATHGEPSPVNSHPQRSDKNNEFIVIHNGIITNYKDLKKFLESKGYDFESETDTETIAKLVKYMYDNRESQDTSFTTLVERVIQQLEGAFALVFKSVHFPGQAVGTRRGSPLLIGVRSEHKLSTDHIPILYRTGKDKKGSCNLSRVDSTTCLFPVEEKAVEYYFASDASAVIEHTNRVIFLEDDDVAAVVDGRLSIHRIKRTAGDHPGRAVQTLQMELQQIMKGNFSSFMQKEIFEQPESVVNTMRGRVNFDDYTVNLGGLKDHIKEIQRCRRLILIACGTSYHAGVATRQVLEELTELPVMVELASDFLDRNTPVFRDDVCFFLSQSGETADTLMGLRYCKERGALTVGITNTVGSSISRETDCGVHINAGPEIGVASTKAYTSQFVSLVMFALMMCDDRISMQERRKEIMLGLKRLPDLIKEVLSMDDEIQKLATELYHQKSVLIMGRGYHYATCLEGALKIKEITYMHSEGILAGELKHGPLALVDKLMPVIMIIMRDHTYAKCQNALQQVVARQGRPVVICDKEDTETIKNTKRTIKVPHSVDCLQGILSVIPLQLLAFHLAVLRGYDVDFPRNLAKSVTVEXGISIQNVRNCMIKQHKTPFVFKTLI

SEQ ID NO: 983 - protein, 636 aa, Homo Sapiens
  misc_feature (614)..(614): Xaa can be any naturally occurring amino acid
MAATAVAAAVAGTESAQGPPGPAASLELWLNKATDPSMSEQDWSAIQNFCEQVNTDPNGPTHAPWLLAHKIQSPQEKEALYALTVLEMCMNHCGEKFHSEVAKFRFLNELIKVLSPKYLGSWATGKVKGRVIEILFSWTVWFPEDIKIRDAYQMLKKQGIIKQDPKLPVDKILPPPSPWPKSSIFDADEEKSKLLTRLLKSNHPEDLQAANRLIKNLVKEEQEKSEKVSKRVSAVEEVRSHVKVLQEMLSMYRRPGQAPPDQEALQVVYERCEKLRPTLFRLASDTTDDDDALAEILQANDLLTQGVLLYKQVMEGRVTFGNRVTSSLGDIPVSRVFQNPAGCMKTCPLIDLEVDNGPAQMGTVVPSLLHQDLAALGISDAPVTGMVSGQNCCEEKRNPSSSTLPGGGVQNPSADRNLLDLLSAQPAPCPLNYVSQKSVPKEVPPGTKSSPGWSWEAGPLAPSPSSQNTPLAQVFVPLESVKPSSLPPLIVYDRNGFRILLHFSQTGAPGHPEVQVLLLTMMSTAPQPVWDIMFQVAVPKSMRVKLQPASSSKLPAFSPLMPPAVISQMLLLDNPHKEPIRLRYKLTFNQGGQPFSEVGEVKDFPDLAVLGAAXLFTRWTLHFKLRLALLLLSSQD

SEQ ID NO: 984 - protein, 324 aa, Homo Sapiens
  misc_feature (319)..(319): Xaa can be any naturally occurring amino acid
MASPGCLLCVLGLLLCGAASLELSRPHGDTAKKPIIGILMQKCRNKVMKNYGRYYIAASYVKYLESAGARVVPVRLDLTEKDYEILFKSINGILFPGGSVDLRRSDYAKVAKIFYNLSIQSFDDGDYFPVWGTCLGFEELSLLISGECLLTATDTVDVAMPLNFTGGQLHSRMFQNFPTELLLSLAVEPLTANFHKWSLSVKNFTMNEKLKKFFNVLTTNTDGKIEFISTMEGYKYPVYGVQWHPEKAPYEWKNLDGISHAPNAVKTAFYLAEFFVNEARKNNHHFKSESEEEKALIYQFSPIYTGNISSFQQCYIFDXKSSIC

SEQ ID NO: 985 - protein, 600 aa, Homo Sapiens
  misc_feature (570)..(570): Xaa can be any naturally occurring amino acid
MKKKLVVLGLLAVVLVLVIVGLCLWLPSASKEPDNHVYTRAAVAADAKQCSKIGRDALRDGGSAVDAAIAALLCVGLMNAHSMGIGGGLFLTIYNSTTRKAEVINAREVAPRLAFATMFNSSEQSQKGGLSVAVPGEIRGYELAHQRHGRLPWARLFQPSIQLARQGFPVGKGLAAALENKRTVIEQQPVLCEVFCRDRKVLREGERLTLPQLADTYETLAIEGAQAFYNGSLTAQIVKDIQAAGGIVTAEDLNNYRAELIEHPLNISLGDVVLYMPSAPLSGPVLALILNILKGYNFSRESVESPEQKGLTYHRIVEAFRFAYAKRTLLGDPKFVDVTEVVRNMTSEFFAAQLRAQISDDTTHPISYYKPEFYTPDDGGTAHLSVVAEDGSAVSATSTINLYFGSKVRSPVSGILFNNEMDDFSSPSITNEFGVPPSPANFIQPGKQPLSSMCPTIMVGQDGQVRMVVGAAGGTQITTATALAIIYNLWFGYDVKRAVEEPRLHNQLLPNVTTVERNIDQAVTAALETRHHHTQIASTFIAVVQAIVRTAGGWAAASDSRKGGEPAGYXVLQEDKADKQSRDKILTRTRKGTLGDRLPL

SEQ ID NO: 986 - protein, 654 aa, Homo Sapiens
  misc_feature (639)..(639): Xaa can be any naturally occurring amino acid
MDLWQLLLTLALAGSSDAFSGSEATAAILSRAPWSLQSVNPGLKTNSSKEPKFTKCRSPERETFSCHWTDEVHHGTKNLGPIQLFYTRRNTQEWTQEWKECPDYVSAGENSCYFNSSFTSIWIPYCIKLTSNGGTVDEKCFSVDEIVQPDPPIALNWTLLNVSLTGIHADIQVRWEAPRNADIQKGWMVLEYELQYKEVNETKWKMMDPILTTSVPVYSLKVDKEYEVRVRSKQRNSGNYGEFSEVLYVTLPQMSQFTCEEDFYFPWLLIIIFGIFGLTVMLFVFLFSKQQRIKMLILPPVPVPKIKGIDPDLLKEGKLEEVNTILAIHDSYKPEFHSDDSWVEFIELDIDEPDEKTEESDTDRLLSSDHEKSHSNLGVKDGDSGRTSCCEPDILETDFNANDIHEGTSEVAQPQRLKGEADLLCLDQKNQNNSPYHDACPATQQPSVIQAEKNKPQPLPTEGAESTHQAAHIQLSNPSSLSNIDFYAQVSDITPAGSVVLSPGQKNKAGMSQCDMHPEMVSLCQENFLMDNAYFCEADAKKCIPVAPHIKVESHIQPSLNQEDIYITTESLTTAAGRPGTGEHVPGSEMPVPDYTSIHIVQSPQGLILNATALPLPDKEFLSSCGYVSTDQLNKIMPXPFFGFPRATYLIAKN

SEQ ID NO: 987 - protein, 113 aa, Homo Sapiens
  misc_feature (109)..(109): Xaa can be any naturally occurring amino acid
MPLWVFFFVILTLSNSSHCSPPPPLTLRMRRYADAIFTNSYRKVLGQLSARKLLQDIMSRQQGESNQERGARARLGRQVDSMWAEQKQMELESILVALLQKHSRNSQGXRFLL

SEQ ID NO: 988 - protein, 154 aa, Homo Sapiens
  misc_feature (118)..(118): Xaa can be any naturally occurring amino acid
MPSPGTVCSLLLLGMLWLDLAMAGSSFLSPEHQRVQQRKESKKPPAKLQPRALAGWLRPEDGGQAEGAEDELEVRFNAPFDVGIKLSGVQYQQHSQALGKFLQDILWEEAKEAPADKXSPTSLTHLSLSLEALIWLFACFCSNSHDCCTSSGGE

SEQ ID NO: 989 - protein, 840 aa, Homo Sapiens
  misc_feature (762)..(762): Xaa can be any naturally occurring amino acid
MSRKGPRAEVCADCSAPDPGWASISRGVLVCDECCSVHRSLGRHISIVKHLRHSAWPPTLLQMVHTLASNGANSIWEHSLLDPAQVQSGRRKANPQDKVHPIKSEFIRAKYQMLAFVHKLPCRDDDGVTAKDLSKQLHSSVRTGNLETCLRLLSLGAQANFFHPEKGTTPLHVAAKAGQTLQAELLVVYGADPGSPDVNGRTPIDYARQAGHHELAERLVECQYELTDRLAFYLCGRKPDHKNGHYIIPQMADSLDLSELAKAAKKKLQALSNRLFEELAMDVYDEVDRRENDAVWLATQNHSTLVTERSAVPFLPVNPEYSATRNQGRQKLARFNAREFATLIIDILSEAKRRQQGKSLSSPTDNLELSLRSQSDLDDQHDYDSVASDEDTDQEPLRSTGATRSNRARSMDSSDLSDGAVTLQEYLELKKALATSEAKVQQLMKVNSSLSDELRRLQREIHKLQAENLQLRQPPGPVPTPPLPSERAEHTPMAPGGSTHRRDRQAFSMYEPGSALKPFGGPPGDELTTRLQPFHSTELEDDAIYSVHVPAGLYRIRKGVSASAVPFTPSSPLLSCSQEGSRHTSKLSRHGSGADSDYENTQSGDPLLGLEGKRFLELGKEEDFHPELESLDGDLDPGLPSTEDVILKTEQVTKNIQELLRAAQEFKHDSFVPCSEKIHLAVTEMASLFPKRPALEPVRSSLRLLNASAYRLQSECRKTVPPEPGAPVDFQLLTQQVIQCAYDIAKAAKQLVTITTREKKQXPLSPHPHLHPRTSLAIGAGPLQTLIPTPTEPLAQVPLVLPHSLAARCPGAHPCRAPKDGEVGGQELLSPTFHAPPLCI

SEQ ID NO: 990 - protein, 690 aa, Homo Sapiens
  misc_feature (680)..(680): Xaa can be any naturally occurring amino acid
MSKRLRSSEVCADCSGPDPSWASVNRGTFLCDECCSVHRSLGRHISQVRHLKHTPWPPTLLQMVETLYNNGANSIWEHSLLDPASIMSGRRKANPQDKVHPNKAEFIRAKYQMLAFVHRLPCRDDDSVTAKDLSKQLHSSVRTGNLETCLRLLSLGAQANFFHPEKGNTPLHVASKAGQILQAELLAVYGADPGTQDSSGKTPVDYARQGGHHELAERLVEIQYELTDRLAFYLCGRKPDHKNGQHFIIPQMADSSLDLSELAKAAKKKLQSLSNHLFEELAMDVYDEVDRRETDAVWLATQNHSALVTETTVVPFLPVNPEYSSTRNQGRQKLARFNAHEFATLVIDILSDAKRRQQGSSLSGSKDNVELILKTINNQHSVESQDNDQPDYDSVASDEDTDLETTASKTNRQKLQTLQSENSNLRKQATTNVYQVQTGSEYTDTSNHSSLKRRPSARGSRPMSMYETGSGQKPYLPMGEASRPEESRMRLQPFPAHASRLEKQNSTPESDYDNTPNDMEPDGMGSSRKGRQRSMVWPGDGLVPDTAEPHVAPSPTLPSTEDVIRKTEQITKNIQELLRAAQENKHDSYIPCSERIHVAVTEMAALFPKKPKSDMVRTSLRLLTSSAYRLQSECKKTLPGDPGSPTDVQLVTQQVIQCAYDIAKAAKQLVTITTKENNNXQGQGTASSVF

SEQ ID NO: 991 - protein, 407 aa, Homo Sapiens
  misc_feature (360)..(360): Xaa can be any naturally occurring amino acid
MTLESMMACCLSDEVKESKRINAEIEKQLRRDKRDARRELKLLLLGTGESGKSTFIKQMRIIHGAGYSEEDKRGFTKLVYQNIFTAMQAMIRAMETLKILYKYEQNKANALLIREVDVEKVTTFEHQYVSAIKTLWEDPGIQECYDRRREYQLSDSAKYYLTDVDRIATLGYLPTQQDVLRVRVPTTGIIEYPFDLENIIFRMVDVGGQRSERRKWIHCFENVTSIMFLVALSEYDQVLVESDNENRMEESKALFRTIITYPWFQNSSVILFLNKKDLLEDKILYSHLVDYFPEFDGPQRDAQAAREFILKMFVDLNPDSDKIIYSHFTCATDTENIRFVFAAVKDTILQLNLKEYNLVXAPRPRETGWRHGAGPSFHGACGCRAGGAAESGPGPLPAGGDFFFSYF

SEQ ID NO: 992 - protein, 137 aa, Homo Sapiens
  misc_feature (69)..(69): Xaa can be any naturally occurring amino acid
MSATNNIAQARKLVEQLRIEAGIERIKVSKAASDLMSYCEQHARNDPLLVGVPASENPFKDKKPCIILXLCSHMFSLSLSLSLSLSLSLSLSQAGHHSVISSNKTSQVPKTFNSKRNPPSPRQKRRSHRPDGVEWTL

SEQ ID NO: 993 - protein, 350 aa, Homo Sapiens
  misc_feature (306)..(306): Xaa can be any naturally occurring amino acid
MAAGLARLLLLLGLSAGGPAPAGAAKMKVVEEPNAFGVNNPFLPQASRLQAKRDPSPVSGPVHLFRLSGKCFSLVESTYKYEFCPFHNVTQHEQTFRWNAYSGILGIWHEWEIANNTFTGMWMRDGDACRSRSRQSKVELACGKSNRLAHVSEPSTCVYALTFETPLVCHPHALLVYPTLPEALQRQWDQVEQDLADELITPQGHEKLLRTLFEDAGYLKTPEENEPTQLEGGPDSLGFETLENCRKAHKELSKEIKRLKGLLTQHGIPYTRPTETSNLEHLGHETPRAKSPEQLRGDPGLRGSLXPCGGRAEVDAAESPTEKLAGRTRRDQLTRLVLREADKTKIQGFN

SEQ ID NO: 994 - protein, 103 aa, Homo Sapiens
  misc_feature (93)..(93): Xaa can be any naturally occurring amino acid
MKPIQKLLAGLILLTWCVEGCSSQHWSYGLRPGGKRDAENLIDSFQEIVKEVGQLAETQRFECTTHQPRSPLRDLKGALESLIEEETGQKKIXIHWARRNDHY

SEQ ID NO: 995 - protein, 2239 aa, Homo Sapiens
  misc_feature (2231)..(2231): Xaa can be any naturally occurring amino acid
MFKKLKQKISEEQQQLQQALAPAQASSNSSTPTRMRSRTSSFTEQLDEGTPNRESGDTQSFAQKLQLRVPSVESLFRSPIKESLFRSSSKESLVRTSSRESLNRLDLDSSTASFDPPSDMDSEAEDLVGNSDSLNKEQLIQRLRRMERSLSSYRGKYSELVTAYQMLQREKKKLQGILSQSQDKSLRRIAELREELQMDQQAKKHLQEEFDASLEEKDQYISVLQTQVSLLKQRLRNGPMNVDVLKPLPQLEPQAEVFTKEENPESDGEPVVEDGTSVKTLETLQQRVKRQENLLKRCKETIQSHKEQCTLLTSEKEALQEQLDERLQELEKIKDLHMAEKTKLITQLRDAKNLIEQLEQDKGMVIAETKRQMHETLEMKEEEIAQLRSRIKQMTTQGEELREQKEKSERAAFEELEKALSTAQKTEEARRKLKAEMDEQIKTIEKTSEEERISLQQELSRVKQEVVDVMKKSSEEQIAKLQKLHEKELARKEQELTKKLQTREREFQEQMKVALEKSQSEYLKISQEKEQQESLALEELELQKKAILTESENKLRDLQQEAETYRTRILELESSLEKSLQENKNQSKDLAVHLEAEKNKHNKEITVMVEKHKTELESLKHQQDALWTEKLQVLKQQYQTEMEKLREKCEQEKETLLKDKEIIFQAHIEEMNEKTLEKLDVKQTELESLSSELSEVLKARHKLEEELSVLKDQTDKMKQELEAKMDEQKNHHQQQVDSIIKEHEVSIQRTEKALKDQINQLELLLKERDKHLKEHQAHVENLEADIKRSEGELQQASAKLDVFQSYQSATHEQTKAYEEQLAQLQQKLLDLETERILLTKQVAEVEAQKKDVCTELDAHKIQVQDLMQQLEKQNSEMEQKVKSLTQVYESKLEDGNKEQEQTKQILVEKENMILQMREGQKKEIEILTQKLSAKEDSIHILNEEYETKFKNQEKKMEKVKQKAKEMQETLKKKLLDQEAKLKKELENTALELSQKEKQFNAKMLEMAQANSAGISDAVSRLETNQKEQIESLTEVHRRELNDVISIWEKKLNQQAEELQEIHEIQLQEKEQEVAELKQKILLFGCEKEEMNKEITWLKEEGVKQDTTLNELQEQLKQKSAHVNSLAQDETKLKAHLEKLEVDLNKSLKENTFLQEQLVELKMLAEEDKRKVSELTSKLKTTDEEFQSLKSSHEKSNKSLEDKSLEFKKLSEELAIQLDICCKKTEALLEAKTNELINISSSKTNAILSRISHCQHRTTKVKEALLIKTCTVSELEAQLRQLTEEQNTLNISFQQATHQLEEKENQIKSMKADIESLVTEKEALQKEGGNQQQAASEKESCITQLKKELSENINAVTLMKEELKEKKVEISSLSKQLTDLNVQLQNSISLSEKEAAISSLRKQYDEEKCELLDQVQDLSFKVDTLSKEKISALEQVDDWSNKFSEWKKKAQSRFTQHQNTVKELQIQLELKSKEAYEKDEQINLLKEELDQQNKRFDCLKGEMEDDKSKMEKKESNLETELKSQTARIMELEDHITQKTIEIESLNEVLKNYNQQKDIEHKELVQKLQHFQELGEEKDNRVKEAEEKILTLENQVYSMKAELETKKKELEHVNLSVKSKEEELKALEDRLESESAAKLAELKRKAEQKIAAIKKQLLSQMEEKEEQYKKGTESHLSELNTKLQEREREVHILEEKLKSVESSQSETLIVPRSAKNVAAYTEQEEADSQGCVQKTYEEKISVLQRNLTEKEKLLQRVGQEKEETVSSHFEMRCQYQERLIKLEHAEAKQHEDQSMIGHLQEELEEKNKKYSLIVAQHVEKEGGKNNIQAKQNLENVFDDVQKTLQEKELTCQILEQKIKELDSCLVRQKEVHRVEMEELTSKYEKLQALQQMDGRNKPTELLEENTEEKSKSHLVQPKLLSNMEAQHNDLEFKLAGAEREKQKLGKEIVRLQKDLRMLRKEHQQELEILKKEYDQEREEKIKQEQEDLELKHNSTLKQLMREFNTQLAQKEQELEMTIKETINKAQEVEAELLESHQEETNQLLKKIAEKDDDLKRTAKRYEEILDAREEEMTAKVRDLQTQLEELQKKYQQKLEQEENPGNDNVTIMELQTQLAQKTTLISDSKLKEQEFREQIHNLEDRLKKYEKNVYATTVGTPYKGGNLYHTDVSLFGEPTEFEYLRKVLFEYMMGRETKTMAKVITTVLKFPDDQTQKILEREDARLMFTSPRSGIFXVNHQSVLS

SEQ ID NO: 996 - protein, 424 aa, Homo Sapiens
  misc_feature (414)..(414): Xaa can be any naturally occurring amino acid
MAPPSVFAEVPQAQPVLVFKLTADFREDPDPRKVNLGVGAYRTDDCHPWVLPVVKKVEQKIANDNSLNHEYLPILGLAEFRSCASRLALGDDSPALKEKRVGGVQSLGGTGALRIGADFLARWYNGTNNKNTPVYVSSPTWENHNAVFSAAGFKDIRSYRYWDAEKRGLDLQGFLNDLENAPEFSIVVLHACAHNPTGIDPTPEQWKQIASVMKHRFLFPFFDSAYQGFASGNLERDAWAIRYFVSEGFEFFCAQSFSKNFGLYNERVGNLTVVGKEPESILQVLSQMEKIVRITWSNPPAQGARIVASTLSNPELFEEWTGNVKTMADRILTMRSELRARLEALKTPGTWNHITDQIGMFSFTGLNPKQVEYLVNEKHIYLLPSGRINVSGLTTKNLDYVATSIHEAVTKIQXRNTTRPVPPK

SEQ ID NO: 997 - protein, 855 aa, Homo Sapiens
  misc_feature (841)..(841): Xaa can be any naturally occurring amino acid
MSAFRLWPGLLIMLGSLCHRGSPCGLSTHVEIGHRALEFLQLHNGRVNYRELLLEHQDAYQAGIVFPDCFYPSICKGGKFHDVSESTHWTPFLNASVHYIRENYPLPWEKDTEKLVAFLFGITSHMAADVSWHSLGLEQGFLRTMGAIDFHGSYSEAHSAGDFGGDVLSQFEFNFNYLARRWYVPVKDLLGIYEKLYGRKVITENVIVDCSHIQFLEMYGEMLAVSKLYPTYSTKSPFLVEQFQEYFLGGLDDMAFWSTNIYHLTSFMLENGTSDCNLPENPLFIACGGQQNHTQGSKMQKNDFHRNLTTSLTESVDRNINYTERGVFFSVNSWTPDSMSFIYKALERNIRTMFIGGSQLSQKHVSSPLASYFLSFPYARLGWAMTSADLNQDGHGDLVVGAPGYSRPGHIHIGRVYLIYGNDLGLPPVDLDLDKEAHRILEGFQPSGRFGSALAVLDFNVDGVPDLAVGAPSVGSEQLTYKGAVYVYFGSKQGGMSSSPNITISCQDIYCNLGWTLLAADVNGDSEPDLVIGSPFAPGGGKQKGIVAAFYSGPSLSDKEKLNVEAANWTVRGEEDFSWFGYSLHGVTVDNRTLLLVGSPTWKNASRLGHLLHIRDEKKSLGRVYGYFPPNGQSWFTISGDKAMGKLGTSLSSGHVLMNGTLKQVLLVGAPTYDDVSKVAFLTVTLHQGGATRMYALTSDAQPLLLSTFSGDRRFSRFGGVLHLSDLDDDGLDEIIMAAPLRIADVTSGLIGGEDGRVYVYNGKETTLGDMTGKCKSWITPCPEEKAQYVLISPEASSRFGSSLITVRSKAKNQVVIAAGRSSLGARLSGALHVYSLGSDXRFHCISPLCPPLSC

SEQ ID NO: 998 - protein, 372 aa, Homo Sapiens
  misc_feature (356)..(356): Xaa can be any naturally occurring amino acid
MEDLEETLFEEFENYSYDLDYYSLESDLEEKVQLGVVHWVSLVLYCLAFVLGIPGNAIVIWFTGFKWKKTVTTLWFLNLAIADFIFLLFLPLYISYVAMNFHWPFGIWLCKANSFTAQLNMFASVFFLTVISLDHYIHLIHPVLSHRHRTLKNSLIVIIFIWLLASLIGGPALYFRDTVEFNNHTLCYNNFQKHDPDLTLIRHHVLTWVKFIIGYLFPLLTMSICYLCLIFKVKKRSILISSRHFWTILVVVVAFVVCWTPYHLFSIWELTIHHNSYSHHVMQAGIPLSTGLAFLNSCLNPILYVLISKKFQARFRSSVAEILKYTLWEVSCSGTVSEQLRNSETKNLCLLETAQXVITFPQISIWLFMWVL

SEQ ID NO: 999 - protein, 622 aa, Homo Sapiens
  misc_feature (618)..(618): Xaa can be any naturally occurring amino acid
MGPTLAVPTPYGCIGCKLPQPEYPPALIIFMFCAMVITIVVDLIGNSMVILAVTKNKKLRNSGNIFVVSLSVADMLVAIYPYPLMLHAMSIGGWDLSQLQCQMVGFITGLSVVGSIFNIVAIAINRYCYICHSLQYERIFSVRNTCIYLVITWIMTVLAVLPNMYIGTIEYDPRTYTCIFNYLNNPVFTVTIVCIHFVLPLLIVGFCYVRIWTKVLAARDPAGQNPDNQLAEVRNFLTMFVIFLLFAVCWCPINVLTVLVAVSPKEMAGKIPNWLYLAAYFIAYFNSCLNAVIYGLLNENFRREYWTIFHAMRHPIIFFSGLISDIREMQEARTLARARAHARDQAREQDRAHACPAVEETPMNVRNVPLPGDAAAGHPDRASGHPKPHSRSSSAYRKSASTHHKSVFSHSKAASGHLKPVSGHSKPASGHPKSATVYPKPASVHFKADSVHFKGDSVHFKPDSVHFKPASSNPKPITGHHVSAGSHSKSAFSAATSHPKPTTGHIKPATSHAEPTTADYPKPATTSHPKPTAADNPELSASHCPEIPAIAHPVSDDSDLPESASSPAAGPTKPAASQLESDTIADLPDPTVVTTSTNDYHDVVVIDVEDDPDEMAVXKMLS

SEQ ID NO: 1000 - protein, 1478 aa, Homo Sapiens
  misc_feature (1465)..(1465): Xaa can be any naturally occurring amino acid
MGRVGYWTLLVLPALLVWRGPAPSAAAEKGPPALNIAVMLGHSHDVTERELRTLWGPEQAAGLPLDVNVVALLMNRTDPKSLITHVCDLMSGARIHGLVFGDDTDQEAVAQMLDFISSHTFVPILGIHGGASMIMADKDPTSTFFQFGASIQQQATVMLKIMQDYDWHVFSLVTTIFPGYREFISFVKTTVDNSFVGWDMQNVITLDTSFEDAKTQVQLKKIHSSVILLYCSKDEAVLILSEARSLGLTGYDFFWIVPSLVSGNTELIPKEFPSGLISVSYDDWDYSLEARVRDGIGILTTAASSMLEKFSYIPEAKASCYGQMERPEVPMHTLHPFMVNVTWDGKDLSFTEEGYQVHPRLVVIVLNKDREWEKVGKWENHTLSLRHAVWPRYKSFSDCEPDDNHLSIVTLEEAPFVIVEDIDPLTETCVRNTVPCRKFVKINNSTNEGMNVKKCCKGFCIDILKKLSRTVKFTYDLYLVTNGKHGKKVNNVWNGMIGEVVYQRAVMAVGSLTINEERSEVVDFSVPFVETGISVMVSRSNGTVSPSAFLEPFSASVWVMMFVMLLIVSAIAVFVFEYFSPVGYNRNLAKGKAPHGPSFTIGKAIWLLWGLVFNNSVPVQNPKGTTSKIMVSVWAFFAVIFLASYTANLAAFMIQEEFVDQVTGLSDKKFQRPHDYSPPFRFGTVPNGSTERNIRNNYPYMHQYMTKFNQKGVEDALVSLKTGKLDAFIYDAAVLNYKAGRDEGCKLVTIGSGYIFATTGYGIALQKGSPWKRQIDLALLQFVGDGEMEELETLWLTGICHNEKNEVMSSQLDIDNMAGVFYMLAAAMALSLITFIWEHLFYWKLRFCFTGVCSDRPGLLFSISRGIYSCIHGVHIEEKKKSPDFNLTGSQSNMLKLLRSAKNISSMSNMNSSRMDSPKRAADFIQRGSLIMDMVSDKGNLMYSDNRSFQGKESIFGDNMNELQTFVANRQKDNLNNYVFQGQHPLTLNESNPNTVEVAVSTESKANSRPRQLWKKSVDSIRQDSLSQNPVSQRDEATAENRTHSLKSPRYLPEEMAHSDISETSNRATCHREPDNSKNHKTKDNFKRSVASKYPKDCSEVERTYLKTKSSSPRDKIYTIDGEKEPGFHLDPPQFVENVTLPENVDFPDPYQDPSENFRKGDSTLPMNRNPLHNEEGLSNNDQYKLYSKHFTLKDKGSPHSETSERYRQNSTHCRSCLSNMPTYSGHFTMRSPFKCDACLRMGNLYDIDEDQMLQETGNPATGEQVYQQDWAQNNALQLQKNKLRISRQHSYDNIVDKPRELDLSRPSRSISLKDRERLLEGNFYGSLFSVPSSKLSGKKSSLFPQGLEDSKRSKSLLPDHTSDNPFLHSHRDDQRLVIGRCPSDPYKHSLPSQAVNDSYLRSSLRSTASYCSRDSRGHNDVYISEHVMPYAANKNNMYSTPRVLNSCSNRRVYKKMPSIESDVXKSSINVLSIGKYT

SEQ ID NO: 1001 - protein, 593 aa, Homo Sapiens
  misc_feature (564)..(564): Xaa can be any naturally occurring amino acid
MDFGSLETVVANSAFIAARGSFDGSSSQPSRDKKYLAKLKLPPLSKCESLRDSLSLEFESVCLEQPIGKKLFQQFLQSAEKHLPALELWKDIEDYDTADNDLQPQKAQTILAQYLDPQAKLFCSFLDEGIVAKFKEGPVEIQDGLFQPLLQATLAHLGQAPFQEYLGSLYFLRFLQWKWLEAQPMGEDWFLDFRVLGKGGFGEVSACQMKATGKLYACKKLNKKRLKKRKGYQGAMVEKKILMKVHSRFIVSLAYAFETKADLCLVMTIMNGGDIRYHIYNVNEENPGFPEPRALFYTAQIICGLEHLHQRRIVYRDLKPENVLLDNDGNVRISDLGLAVELLDGQSKTKGYAGTPGFMAPELLQGEEYDFSVDYFALGVTLYEMIAARGPFRARGEKVENKELKHRIISEPVKYPDKFSQASKDFCEALLEKDPEKRLGFRDETCDKLRAHPLFKDLNWRQLEAGMLMPPFIPDSKTVYAKDIQDVGAFSTVKGVAFDKTDTEFFQEFATGNCPIPWQEEMIETGIFGELNVWRSDGQMPDDMKGISGGSSSSSKSGMCLVSXVTPQSPRGGKGPIRLDGGRLPPWCQPGVC

SEQ ID NO: 1002 - protein, 1567 aa, Homo Sapiens
  misc_feature (1500)..(1500): Xaa can be any naturally occurring amino acid
MMMARKQDVRIPTYNISVVGLSGTEKEKGQCGIGKSCLCNRFVRPSADEFHLDHTSVLSTSDFGGRVVNNDHFLYWGEVSRSLEDCVECKMHIVEQTEFIDDQTFQPHRSTALQPYIKRAAATKLASAEKLMYFCTDQLGLEQDFEQKQMPDGKLLVDGFLLGIDVSRGMNRNFDDQLKFVSNLYNQLAKTKKPIVVVLTKCDEGVERYIRDAHTFALSKKNLQVVETSARSNVNVDLAFSTLVQLIDKSRGKTKIIPYFEALKQQSQQIATAKDKYEWLVSRIVKNHNENWLSVSRKMQASPEYQDYVYLEGTQKAKKLFLQHIHRLKHEHIERRRKLYLAALPLAFEALIPNLDEIDHLSCIKAKKLLETKPEFLKWFVVLEETPWDATSHIDNMENERIPFDLMDTVPAEQLYEAHLEKLRNERKRVEMRRAFKENLETSPFITPGKPWEEARSFIMNEDFYQWLEESVYMDIYGKHQKQIIDKAKEEFQELLLEYSELFYELELDAKPSKEKMGVIQDVLGEEQRFKALQKLQAERDALILKHIHFVYHPTKETCPSCPACVDAKIEHLISSRFIRPSDRNQKNSLSDPNIDRINLVILGKDGLARELANEIRALCTNDDKYVIDGKMYELSLRPIEGNVRLPVNSFQTPTFQPHGCLCLYNSKESLSYVVESIEKSRESTLGRRDNHLVHLPLTLILVNKRGDTSGETLHSLIQQGQQIASKLQCVFLDPASAGIGYGRNINEKQISQVLKGLLDSKRNLNLVSSTASIKDLADVDLRIVMCLMCGDPFSADDILFPVLQSQTCKSSHCGSNNSVLLELPIGLHKKRIELSVLSYHSSFSIRKSRLVHGYIVFYSAKRKASLAMLRAFLCEVQDIIPIQLVALTDGAVDVLDNDLSREQLTEGEEIAQEIDGRFTSIPCSQPQHKLEIFHPFFKDVVEKKNIIEATHMYDNAAEACSTTEEVFNSPRAGSPLCNSNLQDSEEDIEPSYSLFREDTSLPSLSKDHSKLSMELEGNDGLSFIMSNFESKLNNKVPPPVKPKPPVHFEITKGDLSYLDQGHRDGQRKSVSSSPWLPQDGFDPSDYAEPMDAVVKPRNEEENIYSVPHDSTQGKIITIRNINKAQSNGSGNGSDSEMDTSSLERGRKVSIVSKPVLYRTRCTRLGRFASYRTSFSVGSDDELGPIRKKEEDQASQGYKGDNAVIPYETDEDPRRRNILRSLRRNTKKPKPKPRPSITKATWESNYFGVPLTTVVTPEKPIPIFIERCIEYIEATGLSTEGIYRVSGNKSEMESLQRQFDQDHNLDLAEKDFTVNTVAGAMKSFFSELPDPLVPYNMQIDLVEAHKINDREQKLHALKEVLKKFPKENHEVFKYVISHLNKVSHNNKVNLMTSENLSICFWPTLMRPDFSTMDALTATRTYQTIIELFIQQCPFFFYNRPITEPPGARPSSPSAVASTVPFLTSTPVTSQPSPPQSPPPTPQSPMQPLLPSQLQAEHTLXATKTWGDRRTGPLSDGVAFGLEQNQVHWGQRQGQVALPITFSRPQWEHQPMVPSAGLPGTLGLALQT

SEQ ID NO: 1003 - protein, 621 aa, Homo Sapiens
  misc_feature (594)..(594): Xaa can be any naturally occurring amino acid
MWTLVSWVALTAGLVAGTRCPDGQFCPVACCLDPGGASYSCCRPLLDKWPTTLSRHLGGPCQVDAHCSAGHSCIFTVSGTSSCCPFPEAVACGDGHHCCPRGFHCSADGRSCFQRSGNNSVGAIQCPDSQFECPDFSTCCVMVDGSWGCCPMPQASCCEDRVHCCPHGAFCDLVHTRCITPTGTHPLAKKLPAQRTNRAVALSSSVMCPDARSRCPDGSTCCELPSGKYGCCPMPNATCCSDHLHCCPQDTVCDLIQSKCLSKENATTDLLTKLPAHTVGDVKCDMEVSCPDGYTCCRLQSGAWGCCPFTQAVCCEDHIHCCPAGFTCDTQKGTCEQGPHQVPWMEKAPAHLSLPDPQALKRDVPCDNVSSCPSSDTCCQLTSGEWGCCPIPEAVCCSDHQHCCPQGYTCVAEGQCQRGSEIVAGLEKMPARRASLSHPRDIGCDQHTSCPVGQTCCPSLGGSWACCQLPHAVCCEDRQHCCPAGYTCNVKARSCEKEVVSAQPATFLARSPHVGVKDVECGEGHFCHDNQTCCRDNRQGWACCPYRQGVCCADRRHCCPAGFRCAARGTKCLRREAPRWDAPLRDPALRQLLXGTVLKTLQPSGPHSEGALCSGLPSTSP

SEQ ID NO: 1004 - protein, 514 aa, Homo Sapiens
  misc_feature (485)..(485): Xaa can be any naturally occurring amino acid
MGSAFERVVRRVVQELDHGGEFIPVTSLQSSTGFQPYCLVVRKPSSSWFWKPRYKCVNLSIKDILEPDAAEPDVQRGRSFHFYDAMDGQIQGSVELAAPGQAKIAGGAAVSDSSSTSMNVYSLSVDPNTWQTLLHERHLRQPEHKVLQQLRSRGDNVYVVTEVLQTQKEVEVTRTHKREGSGRFSLPGATCLQGEGQGHLSQKKTVTIPSGSTLAFRVAQLVIDSDLDVLLFPDKKQRTFQPPATGHKRSTSEGAWPQLPSGLSMMRCLHNFLTDGVPAEGAFTEDFQGLRAEVETISKELELLDRELCQLLLEGLEGVLRDQLALRALEEALEQGQSLGPVEPLDGPAGAVLECLVLSSGMLVPELAIPVVYLLGALTMLSETQHKLLAEALESQTLLGPLELVGSLLEQSAPWQERSTMSLPPGLLGNSWGEGAPAWVLLDECGLELGEDTPHVCWEPQAQGRMCALYASLALLSGLSQEPHXPVPGHGLAALQQGRVFAHQLLALGRPGAQ

SEQ ID NO: 1005 - protein, 521 aa, Homo Sapiens
  misc_feature (475)..(475): Xaa can be any naturally occurring amino acid
MATNWGSLLQDKQQLEELARQAVDRALAEGVLLRTSQEPTSSEVVSYAPFTLFPSLVPSALLEQAYAVQMDFNLLVDAVSQNAAFLEQTLSSTIKQDDFTARLFDIHKQVLKEGIAQTVFLGLNRSDYMFQRSADGSPALKQIEINTISASFGGLASRTPAVHRHVLSVLSKTKEAGKILSNNPSKGLALGIAKAWELYGSPNALVLLIAQEKERNIFDQRAIENELLARNIHVIRRTFEDISEKGSLDQDRRLFVDGQEIAVVYFRDGYMPRQYSLQNWEARLLLERSHAAKCPDIATQLAGTKKVQQELSRPGMLEMLLPGQPEAVARLRATFAGLYSLDVGEEGDQAIAEALAAPSRFVLKPQREGGGNNLYGEEMVQALKQLKDSEERASYILMEKIEPEPFENCLLRPGSPARVVQCISELGIFGVYVRQEKTLVMNKHVGHLLRTKAIEHADGGVAAGVAVLDNPYPVXGHNQATGPSILCICHSSPSPPEGYPPKDLQSFYGRVNTGTFPQLSI

SEQ ID NO: 1006 - protein, 374 aa, Homo Sapiens
  misc_feature (317)..(317): Xaa can be any naturally occurring amino acid
MASTSRLDALPRVTCPNHPDAILVEDYRAGDMICPECGLVVGDRVIDVGSEWRTFSNDKATKDPSRVGDSQNPLLSDGDLSTMIGKGTGAASFDEFGNSKYQNRRTMSSSDRAMMNAFKEITTMADRINLPRNIVDRTNNLFKQVYEQKSLKGRANDAIASACLYIACRQEGVPRTFKEICAVSRISKKEIGRCFKLILKALETSVDLITTGDFMSRFCSNLCLPKQVQMAATHIARKAVELDLVPGRSPISVAAAAIYMASQASAEKRTQKEIGDIAGVADVTIRQSYRLIYPRAPDLFPTDFKFDTPVDKLPQLXIEAANVKFLNTKLCLLYIAYTKCWVEPFMRKNKRHGTHSRAEYYCLAFCMYILVKHI

SEQ ID NO: 1007 - protein, 1116 aa, Homo Sapiens
  misc_feature (1109)..(1109): Xaa can be any naturally occurring amino acid
MFLGLGRFSRLVLWFAAFRKLLGHHGLASAKFLWCLCLLSVMSLPQQVWTLPYKIGVVGPWACDSLFSKALPEVAARLAIERINRDPSFDLSYSFEYVILNEDCQTSRALSSFISHHQMASGFIGPTNPGYCEAASLLGNSWDKGIFSWACVNYELDNKISYPTFSRTLPSPIRVLVTVMKYFQWAHAGVISSDEDIWVHTANRVASALRSHGLPVGVVLTTGQDSQSMRKALQRIHQADRIRIIIMCMHSALIGGETQMHLLECAHDLKMTDGTYVFVPYDALLYSLPYKHTPYRVLRNNPKLREAYDAVLTITVESQEKTFYQAFTEAAARGEIPEKLEFDQVSPLFGTIYNSIYFIAQAMNNAMKENGQAGAASLVQHSRNMQFHGFNQLMRTDSNGNGISEYVILDTNLKEWELHSTYTVDMEMELLRFGGTPIHFPGGRPPRADAKCWFAEGKICHGGIDPAFAMMVCLTLLIALLSINGFAYFIRRRINKIQLIKGPNRILLTLEDVTFINPHFGSKRGSRASVSFQITSEVQSGRSPRLSFSSGSLTPATYENSNIAIYEGDWVWLKKFSLGDFGDLKSIKSRASDVFEMMKDLRHENINPLLGFFYDSGMFAIVTEFCSRGSLEDILTNQDVKLDWMFKSSLLLDLIKGMKYLHHREFVHGRLKSRNCVVDGRFVLKVTDYGFNDILEMLRLSEEESSMEELLWTAPELLRAPRGSRLGSFAGDVYSFAIIMQEVMVRGTPFCMMDLPAQEIINRLKKPPPVYRPVVPPEHAPPECLQLMKQCWAEAAEQRPTFDEIFNQFKTFNKGKKTNIIDSMLRMLEQYSSNLEDLIRERTEELEIEKQKTEKLLTQMLPPSVAESLKKGCTVEPEGFDLVTLYFSDIVGFTTISAMSEPIEVVDLLNDLYTLFDAIIGSHDVYKVETIGDAYMVASGLPKRNGSRHAAEIANMSLDILSSVGTFKMRHMPEVPVRIRIGLHSGPVVAGVVGLTMPRYCLFGDTVNTASRMESTGLPYRIHVSLSTVTILQNLSEGYEVELRGRTELKGKGTEETFWLIGKKGFMKPLPVPPPVDKDGQVGHGLQPVEIAAFQRRKAERQLVRNKPXGAKGSRI

SEQ ID NO: 1008 - protein, 913 aa, Homo Sapiens
  misc_feature (792)..(792): Xaa can be any naturally occurring amino acid
MWNMLIVAMCLALLGCLQAQELQGHVSIILLGATGDLAKKYLWQGLFQLYLDEAGRGHSFSFHGAALTAPKQGQELMAKALESLSCPKDMAPSHCAEHKDQFLQLSQYRQLKTAEDYQALNKDIEAQLQHAGLREAGRIFYFSVPPFAYEDIARNINSSCRPGPGAWLRVVLEKPFGHDHFSAQQLATELGTFFQEEEMYRVDHYLGKQAVAQILPFRDQNRKALDGLWNRHHVERVEIIMKETVDAEGRTSFYEEYGVIRDVLQNHLTEVLTLVAMELPHNVSSAEAVLRHKLQVFQALRGLQRGSAVVGQYQSYSEQVRRELQKPDSFHSLTPTFAAVLVHIDNLRWEGVPFILMSGKALDERVGYARILFKNQACCVQSEKHWAAAQSQCLPRQLVFHIGHGDLGSPAVLVSRNLFRPSLPSSWKEMEGPPGLRLFGSPLSDYYAYSPVRERDAHSVLLSHIFHGRKNFFITTENLLASWNFWTPLLESLAHKAPRLYPGGAENGRLLDFEFSSGRLFFSQQQPEQLVPGPGPAPMPSDFQVLRAKYRESPLVSAWSEELISKLANDIEATAVRAVRRFGQFHLALSGGSSPVALFQQLATAHYGFPWAHTHLWLVDERCVPLSDPESNFQGLQAHLLQHVRIPYYNIHPMPVHLQQRLCAEEDQGAQIYAREISALVANSSFDLVLLGMGADGHTASLFPQSPTGLDGEQLVVLTTSPSQPHRRMSLSLPLINRAKKVAVLVMGRMKREITTLVSRVGHEPKKWPISGVLPHSGQLVWYMDYDAFLGXGRLCPLPASLLCFPSPVSSLPSRPRHLPSVPWLSRTFYPTVRPQRGQDKPCPDAFDRQLCVLVDRCRNKEEMESAPEKLQIQARREVLRKDLQQLHIHINQHNTGWRPNSGVHKRRRDVVG

SEQ ID NO: 1009 - protein, 596 aa, Homo Sapiens
  misc_feature (561)..(561): Xaa can be any naturally occurring amino acid
MFARMSDLHVLLLMALVGKTACGFSLMSLLESLDPDWTPDQYDYSYEDYNQEENTSSTLTHAENPDWYYTEDQADPCQPNPCEHGGDCLVHGSTFTCSCLAPFSGNKCQKVQNTCKDNPCGRGQCLITQSPPYYRCVCKHPYTGPSCSQVVPVCRPNPCQNGATCSRHKRRSKFTCACPDQFKGKFCEIGSDDCYVGDGYSYRGKMNRTVNQHACLYWNSHLLLQENYNMFMEDAETHGIGEHNFCRNPDADEKPWCFIKVTNDKVKWEYCDVSACSAQDVAYPEESPTEPSTKLPGFDSCGKTEIAERKIKRIYGGFKSTAGKHPWQASLQSSLPLTISMPQGHFCGGALIHPCWVLTAAHCTDIKTRHLKVVLGDQDLKKEEFHEQSFRVEKIFKYSHYNERDEIPHNDIALLKLKPVDGHCALESKYVKTVCLPDGSFPSGSECHISGWGVTETGKGSRQLLDAKVKLIANTLCNSRQLYDHMIDDSMICAGNLQKPGQDTCQGDSGGPLTCEKDGTYYVYGIVSWGLECGKRPGVYTQVTKFLNWIKATIKSESGFXGTVFWTSEPTLLGTLTPGGLMANNGHLQSLQGTTQ

SEQ ID NO: 1010 - protein, 794 aa, Homo Sapiens
  misc_feature (764)..(764): Xaa can be any naturally occurring amino acid
MVACRAIGILSRFSAFRILRSRGYICRNFTGSSALLTRTHINYGVKGDVAVVRINSPNSKVNTLSKELHSEFSEVMNEIWASDQIRSAVLISSKPGCFIAGADINMLAACKTLQEVTQLSQEAQRIVEKLEKSTKPIVAAINGSCLGGGLEVAISCQYRIATKDRKTVLGTPEVLLGALPGAGGTQRLPKMVGVPAALDMMLTGRSIRADRAKKMGLVDQLVEPLGPGLKPPEERTIEYLEEVAITFAKGLADKKISPKRDKGLVEKLTAYAMTIPFVRQQVYKKVEEKVRKQTKGLYPAPLKIIDVVKTGIEQGSDAGYLCESQKFGELVMTKESKALMGLYHGQVLCKKNKFGAPQKDVKHLAILGAGLMGAGIAQVSVDKGLKTILKDATLTALDRGQQQVFKGLNDKVKKKALTSFERDSIFSNLTGQLDYQGFEKADMVIEAVFEDLSLKHRVLKEVEAVIPDHCIFASNTSALPISEIAAVSKRPEKVIGMHYFSPVDKMQLLEIITTEKTSKDTSASAVAVGLKQGKVIIVVKDGPGFYTTRCLAPMMSEVIRILQEGVDPKKLDSLTTSFGFPVGAATLVDEVGVDVAKHVAEDLGKVFGERFGGGNPELLTQMVSKGFLGRKSGKGFYIYQEGVKRKDLNSDMDSILASLKLPPKSEVSSDEDIQFRLVTRFVNEAVMCLQEGILATPAEGDIGAVFGLGFPPCLGGPFRFVDLYGAQKIVDRLKKYEAAYGKQFTPCQLLADHANSPNKKFYQXAGLMPRSVSALTPAAGSAGSPTEWCLDLSE

SEQ ID NO: 1011 - protein, 3152 aa, Homo Sapiens
  misc_feature (3145)..(3145): Xaa can be any naturally occurring amino acid
MATLEKLMKAFESLKSFQQQQQQQQQQQQQQQQQQQQQQQPPPPPPPPPPPQLPQPPPQAQPLLPQPQPPPPPPPPPPGPAVAEEPLHRPKKELSATKKDRVNHCLTICENIVAQSVRNSPEFQKLLGIAMELFLLCSDDAESDVRMVADECLNKVIKALMDSNLPRLQLELYKEIKKNGAPRSLRAALWRFAELAHLVRPQKCRPYLVNLLPCLTRTSKRPEESVQETLAAAVPKIMASFGNFANDNEIKVLLKAFIANLKSSSPTIRRTAAGSAVSICQHSRRTQYFYSWLLNVLLGLLVPVEDEHSTLLILGVLLTLRYLVPLLQQQVKDTSLKGSFGVTRKEMEVSPSAEQLVQVYELTLHHTQHQDHNVVTGALELLQQLFRTPPPELLQTLTAVGGIGQLTAAKEESGGRSRSGSIVELIAGGGSSCSPVLSRKQKGKVLLGEEEALEDDSESRSDVSSSALTASVKDEISGELAASSGVSTPGSAGHDIITEQPRSQHTLQADSVDLASCDLTSSATDGDEEDILSHSSSQVSAVPSDPAMDLNDGTQASSPISDSSQTTTEGPDSAVTPSDSSEIVLDGTDNQYLGLQIGQPQDEDEEATGILPDEASEAFRNSSMALQQAHLLKNMSHCRQPSDSSVDKFVLRDEATEPGDQENKPCRIKGDIGQSTDDDSAPLVHCVRLLSASFLLTGGKNVLVPDRDVRVSVKALALSCVGAAVALHPESFFSKLYKVPLDTTEYPEEQYVSDILNYIDHGDPQVRGATAILCGTLICSILSRSRFHVGDWMGTIRTLTGNTFSLADCIPLLRKTLKDESSVTCKLACTAVRNCVMSLCSSSYSELGLQLIIDVLTLRNSSYWLVRTELLETLAEIDFRLVSFLEAKAENLHRGAHHYTGLLKLQERVLNNVVIHLLGDEDPRVRHVAAASLIRLVPKLFYKCDQGQADPVVAVARDQSSVYLKLLMHETQPPSHFSVSTITRIYRGYNLLPSITDVTMENNLSRVIAAVSHELITSTTRALTFGCCEALCLLSTAFPVCIWSLGWHCGVPPLSASDESRKSCTVGMATMILTLLSSAWFPLDLSAHQDALILAGNLLAASAPKSLRSSWASEEEANPAATKQEEVWPALGDRALVPMVEQLFSHLLKVINICAHVLDDVAPGPAIKAALPSLTNPPSLSPIRRKGKEKEPGEQASVPLSPKKGSEASAASRQSDTSGPVTTSKSSSLGSFYHLPSYLKLHDVLKATHANYKVTLDLQNSTEKFGGFLRSALDVLSQILELATLQDIGKCVEEILGYLKSCFSREPMMATVCVQQLLKTLFGTNLASQFDGLSSNPSKSQGRAQRLGSSSVRPGLYHYCFMAPYTHFTQALADASLRNMVQAEQENDTSGWFDVLQKVSTQLKTNLTSVTKNRADKNAIHNHIRLFEPLVIKALKQYTTTTCVQLQKQVLDLLAQLVQLRVNYCLLDSDQVFIGFVLKQFEYIEVGQFRESEAIIPNIFFFLVLLSYERYHSKQIIGIPKIIQLCDGIMASGRKAVTHAIPALQPIVHDLFVLRGTNKADAGKELETQKEVVVSMLLRLIQYHQVLEMFILVLQQCHKENEDKWKRLSRQIADIILPMLAKQQMHIDSHEALGVLNTLFEILAPSSLRPVDMLLRSMFVTPNTMASVSTVQLWISGILAILRVLISQSTEDIVLSRIQELSFSPYLISCTVINRLRDGDSTSTLEEHSEGKQIKNLPEETFSRFLLQLVGILLEDIVTKQLKVEMSEQQHTFYCQELGTLLMCLIHIFKSGMFRRITAAATRLFRSDGCGGSFYTLDSLNLRARSMITTHPALVLLWCQILLLVNHTDYRWWAEVQQTPKRHSLSSTKLLSPQMSGEEEDSDLAAKLGMCNREIVRRGALILFCDYVCQNLHDSEHLTWLIVNHIQDLISLSHEPPVQDFISAVHRNSAASGLFIQAIQSRCENLSTPTMLKKTLQCLEGIHLSQSGAVLTLYVDRLLCTPFRVLARMVDILACRRVEMLLAANLQSSMAQLPMEELNRIQEYLQSSGLAQRHQRLYSLLDRFRLSTMQDSLSPSPPVSSHPLDGDGHVSLETVSPDKDWYVHLVKSQCWTRSDSALLEGAELVNRIPAEDMNAFMMNSEFNLSLLAPCLSLGMSEISGGQKSALFEAAREVTLARVSGTVQQLPAVHHVFQPELPAEPAAYWSKLNDLFGDAALYQSLPTLARALAQYLVVVSKLPSHLHLPPEKEKDIVKFVVATLEALSWHLIHEQIPLSLDLQAGLDCCCLALQLPGLWSVVSSTEFVTHACSLIYCVHFILEAVAVQPGEQLLSPERRTNTPKAISEEEEEVDPNTQNPKYITAACEMVAEMVESLQSVLALGHKRNSGVPAFLTPLLRNIIISLARLPLVNSYTRVPPLVWKLGWSPKPGGDFGTAFPEIPVEFLQEKEVFKEFIYRINTLGWTSRTQFEETWATLLGVLVTQPLVMEQEESPPEEDTERTQINVLAVQAITSLVLSAMTVPVAGNPAVSCLEQQPRNKPLKALDTRFGRKLSIIRGIVEQEIQAMVSKRENIATHHLYQAWDPVPSLSPATTGALISHEKLLLQINPERELGSMSYKLGQVSIHSVWLGNSITPLREEEWDEEEEEEADAPAPSSPPTSPVNSRKHRAGVDIHSCSQFLLELYSRWILPSSSARRTPAILISEVVRSLLVVSDLFTERNQFELMYVTLTELRRVHPSEDEILAQYLVPATCKAAAVLGMDKAVAEPVSRLLESTLRSSHLPSRVGALHGVLYVLECDLLDDTAKQLIPVISDYLLSNLKGIAHCVNIHSQQHVLVMCATAFYLIENYPLDVGPEFSASIIQMCGVMLSGSEESTPSIIYHCALRGLERLLLSEQLSRLDAESLVKLSVDRVNVHSPHRAMAALGLMLTCMYTGKEKVSPGRTSDPNPAAPDSESVIVAMERVSVLFDRIRKGFPCEARVVARILPQFLDDFFPPQDIMNKVIGEFLSNQQPYPQFMATVVYKVFQTLHSTGQSSMVRDWVMLSLSNFTQRAPVAMATWSLSCFFVSASTSPWVAAILPHVISRMGKLEQVDVNLFCLVATDFYRHQIEEELDRRAFQSVLEVVAAPGSPYHRLLTCLRNVHKVTTCXAPWWERL

SEQ ID NO: 1012 - protein, 541 aa, Homo Sapiens
  misc_feature (530)..(530): Xaa can be any naturally occurring amino acid
MTSSRLWFSLLLAAAFAGRATALWPWPQNFQTSDQRYVLYPNNFQFQYDVSSAAQPGCSVLDEAFQRYRDLLFGSGSWPRPYLTGKRHTLEKNVLVVSVVTPGCNQLPTLESVENYTLTINDDQCLLLSETVWGALRGLETFSQLVWKSAEGTFFINKTEIEDFPRFPHRGLLLDTSRHYLPLSSILDTLDVMAYNKLNVFHWHLVDDPSFPYESFTFPELMRKGSYNPVTHIYTAQDVKEVIEYARLRGIRVLAEFDTPGHTLSWGPGIPGLLTPCYSGSEPSGTFGPVNPSLNNTYEFMSTFFLEVSSVFPDFYLHLGGDEVDFTCWKSNPEIQDFMRKKGFGEDFKQLESFYIQTLLDIVSSYGKGYVVWQEVFDNKVKIQPDTIIQVWREDIPVNYMKELELVTKAGFRALLSAPWYLNRISYGPDWKDFYVVEPLAFEGTPEQKALVIGGEACMWGEYVDNTNLVPRLWPRAGAVAERLWSNKLTSDLTFAYERLSHFRCELLRRGVQAQPLNVGFCEQEFEQTXAPGTEEGAGCR

SEQ ID NO: 1013 - protein, 582 aa, Homo Sapiens
  misc_feature (557)..(557): Xaa can be any naturally occurring amino acid
MELCGLGLPRPPMLLALLLATLLAAMLALLTQVALVVQVAEAARAPSVSAKPGPALWPLPLSVKMTPNLLHLAPENFYISHSPNSTAGPSCTLLEEAFRRYHGYIFGFYKWHHEPAEFQAKTQVQQLLVSITLQSECDAFPNISSDESYTLLVKEPVAVLKANRVWGALRGLETFSQLVYQDSYGTFTINESTIIDSPRFSHRGILIDTSRHYLPVKIILKTLDAMAFNKFNVLHWHIVDDQSFPYQSITFPELSNKGSYSLSHVYTPNDVRMVIEYARLRGIRVLPEFDTPGHTLSWGKGQKDLLTPCYSRQNKLDSFGPINPTLNTTYSFLTTFFKEISEVFPDQFIHLGGDEVEFKCWESNPKIQDFMRQKGFGTDFKKLESFYIQKVLDIIATINKGSIVWQEVFDDKAKLAPGTIVEVWKDSAYPEELSRVTASGFPVILSAPWYLDLISYGQDWRKYYKVEPLDFGGTQKQKQLFIGGEACLWGEYVDATNLTPRLWPRASAVGERLWSSKDVRDMDDAYDRLTRHRCRMVERGIAAQPLYAGYCNHENMXKMEGKKATAICTTINFILKSCKIRY

SEQ ID NO: 1014 - protein, 786 aa, Homo Sapiens
  misc_feature (778)..(778): Xaa can be any naturally occurring amino acid
MGRGSGTFERLLDKATSQLLLETDWESILQICDLIRQGDTQAKYAVNSIKKKVNDKNPHVALYALEVMESVVKNCGQTVHDEVANKQTMEELKDLLKRQVEVNVRNKILYLIQAWAHAFRNEPKYKVVQDTYQIMKVEGHVFPEFKESDAMFAAERAPDWVDAEECHRCRVQFGVMTRKHHCRACGQIFCGKCSSKYSTIPKFGIEKEVRVCEPCYEQLNRKAEGKATSTTELPPEYLTSPLSQQSQLPPKRDETALQEEEELQLALALSQSEAEEKERLRQKSTYTSYPKAEPMPSASSAPPASSLYSSPVNSSAPLAEDIDPELARYLNRNYWEKKQEEARKSPTPSAPVPLTEPAAQPGEGHAAPTNVVENPLPETDSQPIPPSGGPFSEPQFHNGESEESHEQFLKALQNAVTTFVNRMKSNHMRGRSITNDSAVLSLFQSINGMHPQLLELLNQLDERRLYYEGLQDKLAQIRDARGALSALREEHREKLRRAAEEAERQRQIQLAQKLEIMRQKKQEYLEVQRQLAIQRLQEQEKERQMRLEQQKQTVQMRAQMPAFPLPYAQLQAMPAAGGVLYQPSGPASFPSTFSPAGSVEGSPMHGVYMSQPAPAAGPYPSMPSTAADPSMVSAYMYPAGATGAQAAPQAQAGPTASPAYSSYQPTPTAGYQNVASQAPQSLPAISQPPQSSTMGYMGSQSVSMGYQPYNMQNLMTTLPSQDASLPPQQPYIAGQQPMYQQMAPSGGPPQQQPPVAQQPQAQGPPAQGSEAQLISFDXPRPCSRPE

SEQ ID NO: 1015 - protein, 339 aa, Homo Sapiens
  misc_feature (326)..(326): Xaa can be any naturally occurring amino acid
MAAMRKALPRRLVGLASLRAVSTSSMGTLPKRVKIVEVGPRDGLQNEKNIVSTPVKIKLIDMLSEAGLSVIETTSFVSPKWVPQMGDHTEVLKGIQKFPGINYPVLTPNLKGFEAAVAAGAKEVVIFGAASELFTKKNINCSIEESFQRFDAILKAAQSANISVRGYVSCALGCPYEGKISPAKVAEVTKKFYSMGCYEISLGDTIGVGTPGIMKDMLSAVMQEVPLAALAVHCHDTYGQALANTLMALQMGVSVVDSSVAGLGGCPYAQGASGNLATEDLVYMLEGLGIHTGVNLQKLLEAGNFICQALNRKTSSKVAQATCKLXAPCPPEALGMMWK

SEQ ID NO: 1016 - protein, 894 aa, Homo Sapiens
  misc_feature (889)..(889): Xaa can be any naturally occurring amino acid
MLSRLFRMHGLFVASHPWEVIVGTVTLTICMMSMNMFTGNNKICGWNYECPKFEEDVLSSDIIILTITRCIAILYIYFQFQNLRQLGSKYILGIAGLFTIFSSFVFSTVVIHFLDKELTGLNEALPFFLLLIDLSRASTLAKFALSSNSQDEVRENIARGMAILGPTFTLDALVECLVIGVGTMSGVRQLEIMCCFGCMSVLANYFVFMTFFPACVSLVLELSRESREGRPIWQLSHFARVLEEEENKPNPVTQRVKMIMSLGLVLVHAHSRWIADPSPQNSTADTSKVSLGLDENVSKRIEPSVSLWQFYLSKMISMDIEQVITLSLALLLAVKYIFFEQTETESTLSLKNPITSPVVTQKKVPDNCCRREPMLVRNNQKCDSVEEETGINRERKVEVIKPLVAETDTPNRATFVVGNSSLLDTSSVLVTQEPEIELPREPRPNEECLQILGNAEKGAKFLSDAEIIQLVNAKHIPAYKLETLMETHERGVSIRRQLLSKKLSEPSSLQYLPYRDYNYSLVMGACCENVIGYMPIPVGVAGPLCLDEKEFQVPMATTEGCLVASTNRGCRAIGLGGGASSRVLADGMTRGPVVRLPRACDSAEVKAWLETSEGFAVIKEAFDSTSRFARLQKLHTSIAGRNLYIRFQSRSGDAMGMNMISKGTEKALSKLHEYFPEMQILAVSGNYCTDKKPAAINWIEGRGKSVVCEAVIPAKVVREVLKTTTEAMIEVNINKNLVGSAMAGSIGGYNAHAANIVTAIYIACGQDAAQNVGSSNCITLMEASGPTNEDLYISCTMPSIEIGTVGGGTNLLPQQACLQMLGVQGACKDNPGENARQLARIVCGTVMAGELSLMAALAAGHLVKSHMIHNRSKINLQDLQGACTKKTAXIARQF

SEQ ID NO: 1017 - protein, 540 aa, Homo Sapiens
  misc_feature (526)..(526): Xaa can be any naturally occurring amino acid
MKALIAALLLITLQYSCAVSPTDCSAVEPEAEKALDLINKRRRDGYLFQLLRIADAHLDRVENTTVYYLVLDVQESDCSVLSRKYWNDCEPPDSRRPSEIVIGQCKVIATRHSHESQDLRVIDFNCTTSSVSSALANTKDSPVLIDFFEDTERYRKQANKALEKYKEENDDFASFRVDRIERVARVRGGEGTGYFVDFSVRNCPRHHFPRHPNVFGFCRADLFYDVEALDLESPKNLVINCEVFDPQEHENINGVPPHLGHPFHWGGHERSSTTKPPFKPHGSRDHHHPHKPHEHGPPPPPDERDHSHGPPLPQGPPPLLPMSCSSCQHATFGTNGAQRHSHNNNSSDLHPHKHHSHEQHPHGHHPHAHHPHEHDTHRQHPHGHHPHGHHPHGHHPHGHHPHGHHPHCHDFQDYGPCDPPPHNQGHCCHGHGPPPGHLRRRGPGKGPRPFHCRQIGSVYRLPPLRKGEVLPLPEANFPSFPLPHHKHPLKPDNQPFPQSVSESCPGKFKSGFPQVSMFFTHTFPKXNVIPLKRKMNNTLN

SEQ ID NO: 1018 - protein, 659 aa, Homo Sapiens
  misc_feature (655)..(655): Xaa can be any naturally occurring amino acid
MKLSLVAAMLLLLSAARAEEEDKKEDVGTVVGIDLGTTYSCVGVFKNGRVEIIANDQGNRITPSYVAFTPEGERLIGDAAKNQLTSNPENTVFDAKRLIGRTWNDPSVQQDIKFLPFKVVEKKTKPYIQVDIGGGQTKTFAPEEISAMVLTKMKETAEAYLGKKVTHAVVTVPAYFNDAQRQATKDAGTIAGLNVMRIINEPTAAAIAYGLDKREGEKNILVFDLGGGTFDVSLLTIDNGVFEVVATNGDTHLGGEDFDQRVMEHFIKLYKKKTGKDVRKDNRAVQKLRREVEKAKRALSSQHQARIEIESFYEGEDFSETLTRAKFEELNMDLFRSTMKPVQKVLEDSDLKKSDIDEIVLVGGSTRIPKIQQLVKEFFNGKEPSRGINPDEAVAYGAAVQAGVLSGDQDTGDLVLLDVCPLTLGIETVGGVMTKLIPRNTVVPTKKSQIFSTASDNQPTVTIKVYEGERPLTKDNHLLGTFDLTGIPPAPRGVPQIEVTFEIDVNGILRVTAEDKGTGNKNKITITNDQNRLTPEEIERMVNDAEKFAEEDKKLKERIDTRNELESYAYSLKNQIGDKEKLGGKLSSEDKETMEKAVEEKIEWLESHQDADIEDFKAKKKELEEIVQPIISKLYGSAGPPPTGEEDTAEKDELXTLIC

SEQ ID NO: 1019 - protein, 473 aa, Homo Sapiens
  misc_feature (446)..(446): Xaa can be any naturally occurring amino acid
MMDVNSSGRPDLYGHLRSFLLPEVGRGLPDLSPDGGADPVAGSWAPHLLSEVTASPAPTWDAPPDNASGCGEQINYGRVEKVVIGSILTLITLLTIAGNCLVVISVCFVKKLRQPSNYLIVSLALADLSVAVAVMPFVSVTDLIGGKWIFGHFFCNVFIAMDVMCCTASIMTLCVISIDRYLGITRPLTYPVRQNGKCMAKMILSVWLLSASITLPPLFGWAQNVNDDKVCLISQDFGYTIYSTAVAFYIPMSVMLFMYYQIYKAARKSAAKHKFPGFPRVEPDSVIALNGIVKLQKEVEECANLSRLLKHERKNISIFKREQKAATTLGIIVGAFTVCWLPFFLLSTARPFICGTSCSCIPLWVERTFLWLGYANSLINPFIYAFFNRDLRTTYRSLLQCQYRNINRKLSAAGMHEALKLAERPERPEFVLQNADYCRKKGHDSXLKAEQWRRKSFAESAEWNAASVLSWDV

SEQ ID NO: 1020 - protein, 492 aa, Homo Sapiens
  misc_feature (480)..(480): Xaa can be any naturally occurring amino acid
MMDVNSSGRPDLYGHLRSFLLPEVGRGLPDLSPDGGADPVAGSWAPHLLSEVTASPAPTWDAPPDNASGCGEQINYGRVEKVVIGSILTLITLLTIAGNCLVVISVCFVKKLRQPSNYLIVSLALADLSVAVAVMPFVSVTDLIGGKWIFGHFFCNVFIAMDVMCCTASIMTLCVISIDRYLGITRPLTYPVRQNGKCMAKMILSVWLLSASITLPPLFGWAQNVNDDKVCLISQDFGYTIYSTAVAFYIPMSVMLFMYYQIYKAARKSAAKHKFPGFPRVEPDSVIALNGIVKLQKEVEECANLSRLLKHERKNISIFKREQKAATTLGIIVGAFTVCWLPFFLLSTARPFICGTSCSCIPLWVERTFLWLGYANSLINPFIYAFFNRDLRTTYRSLLQCQYRNINRKLSAAGMHEALKLAERPERPEFVLRACTRRVLLRPEKRPPVSVWVLQSPDHHNWLADKMLTTVEKKVMIHDXKQNNGDEINKAK

SEQ ID NO: 1021 - protein, 448 aa, Homo Sapiens
  misc_feature (433)..(433): Xaa can be any naturally occurring amino acid
MMDVNSSGRPDLYGHLRSFLLPEVGRGLPDLSPDGGADPVAGSWAPHLLSEVTASPAPTWDAPPDNASGCGEQINYGRVEKVVIGSILTLITLLTIAGNCLVVISVCFVKKLRQPSNYLIVSLALADLSVAVAVMPFVSVTDLIGGKWIFGHFFCNVFIAMDVMCCTASIMTLCVISIDRYLGITRPLTYPVRQNGKCMAKMILSVWLLSASITLPPLFGWAQNVNDDKVCLISQDFGYTIYSTAVAFYIPMSVMLFMYYQIYKAARKSAAKHKFPGFPRVEPDSVIALNGIVKLQKEVEECANLSRLLKHERKNISIFKREQKAATTLGIIVGAFTVCWLPFFLLSTARPFICGTSCSCIPLWVERTFLWLGYANSLINPFIYAFFNRDLRTTYRSLLQCQYRNINRKLSAAGMHEALKLAERPERPEFVLXDKMLTTVEKKVMIHD

SEQ ID NO: 1022 - protein, 1091 aa, Homo Sapiens
  misc_feature (1000)..(1000): Xaa can be any naturally occurring amino acid
MADKVRRQRPRRRVCWALVAVLLADLLALSDTLAVMSVDLGSESMKVAIVKPGVPMEIVLNKESRRKTPVIVTLKENERFFGDSAASMAIKNPKATLRYFQHLLGKQADNPHVALYQARFPEHELTFDPQRQTVHFQISSQLQFSPEEVLGMVLNYSRSLAEDFAEQPIKDAVITVPVFFNQAERRAVLQAARMAGLKVLQLINDNTATALSYGVFRRKDINTTAQNIMFYDMGSGSTVCTIVTYQMVKTKEAGMQPQLQIRGVGFDRTLGGLEMELRLRERLAGLFNEQRKGQRAKDVRENPRAMAKLLREANRLKTVLSANADHMAQIEGLMDDVDFKAKVTRVEFEELCADLFERVPGPVQQALQSAEMSLDEIEQVILVGGATRVPRVQEVLLKAVGKEELGKNINADEAAAMGAVYQAAALSKAFKVKPFVVRDAVVYPILVEFTREVEEEPGIHSLKHNKRVLFSRMGPYPQRKVITFNRYSHDFNFHINYGDLGFLGPEDLRVFGSQNLTTVKLKGVGDSFKKYPDYESKGIKAHFNLDESGVLSLDRVESVFETLVEDSAEEESTLTKLGNTISSLFGGGTTPDAKENGTDTVQEEEESPAEGSKDEPGEQVELKEEAEAPVEDGSQPPPPEPKGDATPEGEKATEKENGDKSEAQKPSEKAEAGPEGVAPAPEGEKKQKPARKRRMVEEIGVELVVLDLPDLPEDKLAQSVQKLQDLTLRDLEKQEREKAANSLEAFIFETQDKLYQPEYQEVSTEEQREEISGKLSAASTWLEDEGVGATTVMLKEKLAELRKLCQGLFFRVEERKKWPERLSALDNLLNHSSMFLKGARLIPEMDQIFTEVEMTTLEKVINETWAWKNATLAEQAKLPATEKPVLLSKDIEAKMMALDREVQYLLNKAKFTKPRPRPKDKNGTRAEPPLNASASDQGEKVIPPAGQTEDAEPISEPEKVETGSEPGDTEPLELGGPGAEPEQKEQSTGQKRPLKNDELXPPPLFSPFISTPFPHHFYLFNIEGWGRGWSCPRLEFLSHPCDLEVWRRGREGQLTGSFCSTSVVKNGNCSPPQPHSLFPTHIGPKFGKNHY

SEQ ID NO: 1023 - protein, 568 aa, Homo Sapiens
  misc_feature (548)..(548): Xaa can be any naturally occurring amino acid
MATMVPSVLWPRACWTLLVCCLLTPGVQGQEFLLRVEPQNPVLSAGGSLFVNCSTDCPSSEKIALETSLSKELVASGMGWAAFNLSNVTGNSRILCSVYCNGSQITGSSNITVYGLPERVELAPLPPWQPVGQNFTLRCQVEGGSPRTSLTVVLLRWEEELSRQPAVEEPAEVTATVLASRDDHGAPFSCRTELDMQPQGLGLFVNTSAPRQLRTFVLPVTPPRLVAPRFLEVETSWPVDCTLDGLFPASEAQVYLALGDQMLNATVMNHGDTLTATATATARADQEGAREIVCNVTLGGERREARENLTVFSFLGPIVNLSEPTAHEGSTVTVSCMAGARVQVTLDGVPAAAPGQPAQLQLNATESDDGRSFFCSATLEVDGEFLHRNSSVQLRVLYGPKIDRATCPQHLKWKDKTRHVLQCQARGNPYPELRCLKEGSSREVPVGIPFFVNVTHNGTYQCQASSSRGKYTLVVVMDIEAGSSHFVPVFVAVLLTLGVVTIVLALMYVFREHQRSGSYHVREESTYLPLTSMQPTEAMGEEPSRAEXRWDPGSKLAGAWLCPQIPHQ

SEQ ID NO: 1024 - protein, 428 aa, Homo Sapiens
  misc_feature (394)..(394): Xaa can be any naturally occurring amino acid
MALKVATVAGSAAKAVLGPALLCRPWEVLGAHEVPSRNIFSEQTIPPSAKYGGRHTVTMIPGDGIGPELMLHVKSVFRHACVPVDFEEVHVSSNADEEDIRNAIMAIRRNRVALKGNIETNHNLPPSHKSRNNILRTSLDLYANVIHCKSLPGVVTRHKDIDILIVRENTEGEYSSLEHESVAGVVESLKIITKAKSLRIAEYAFKLAQESGRKKVTAVHKANIMKLGDGLFLQCCREVAARYPQITFENMIVDNTTMQLVSRPQQFDVMVMPNLYGNIVNNVCAGLVGGPGLVAGANYGHVYAVFETATRNTGKSIANKNIANPTATLLASCMMLDHLKLHSYATSIRKAVLASMDNENMHTPDIGGQGTTSEAIQDVIRHIRVINGRAVEAXAGPRTFLVCSLDSPSHSSTPASLVRRSQNKAPSP

SEQ ID NO: 1025 - protein, 154 aa, Homo Sapiens
  misc_feature (120)..(120): Xaa can be any naturally occurring amino acid
MEASALTSSAVTSVAKVVRVASGSAVVLPLARIATVVIGGVVAVPMVLSAMGFTAAGIASSSIAAKMMSAAAIANGGGVASGSLVATLQSLGATGLSGLTKFILGSIGSAIAAVIARFYXLPAPRPAEKRTMPGEKAPSHPDPARSQLSQIYLG

SEQ ID NO: 1026 - protein, 660 aa, Homo Sapiens
  misc_feature (606)..(606): Xaa can be any naturally occurring amino acid
MALRKGGLALALLLLSWVALGPRSLEGADPGTPGEAEGPACPAACVCSYDDDADELSVFCSSRNLTRLPDGVPGGTQALWLDGNNLSSVPPAAFQNLSSLGFLNLQGGQLGSLEPQALLGLENLCHLHLERNQLRSLALGTFAHTPALASLGLSNNRLSRLEDGLFEGLGSLWDLNLGWNSLAVLPDAAFRGLGSLRELVLAGNRLAYLQPALFSGLAELRELDLSRNALRAIKANVFVQLPRLQKLYLDRNLIAAVAPGAFLGLKALRWLDLSHNRVAGLLEDTFPGLLGLRVLRLSHNAIASLRPRTFKDLHFLEELQLGHNRIRQLAERSFEGLGQLEVLTLDHNQLQEVKAGAFLGLTNVAVMNLSGNCLRNLPEQVFRGLGKLHSLHLEGSCLGRIRPHTFTGLSGLRRLFLKDNGLVGIEEQSLWGLAELLELDLTSNQLTHLPHRLFQGLGKLEYLLLSRNRLAELPADALGPLQRAFWLDVSHNRLEALPNSLLAPLGRLRYLSLRNNSLRTFTPQPPGLERLWLEGNPWDCGCPLKALRDFALQNPSAVPRFVQAICEGDDCQPPAYTYNNITCASPPEVVGLDLRDLSEAHFAPCXPGPRTQAPDSGPHLAHLVLGTGPQCPQGPAQCTCWKTQGPDGVEGMAAPPAVIN

SEQ ID NO: 1027 - protein, 264 aa, Homo Sapiens
  misc_feature (260)..(260): Xaa can be any naturally occurring amino acid
MSEVPVARVWLVLLLLTVQVGVTAGAPWQCAPCSAEKLALCPPVSASCSEVTRSAGCGCCPMCALPLGAACGVATARCARGLSCRALPGEQQPLHALTRGQGACVQESDASAPHAAEAGSPESPESTEITEEELLDNFHLMAPSEEDHSILWDAISTYDGSKALHVTNIKKWKEPCRIELYRVVESLAKAQETSGEEISKFYLPNCNKNGFYHSRQCETSMDGEAGLCWCVYPWNGKRIPGSPEIRGDPNCQIYFNVQNXNQMK

SEQ ID NO: 1028 - protein, 377 aa, Homo Sapiens
  misc_feature (273)..(273): Xaa can be any naturally occurring amino acid
MVLLTAVLLLLAAYAGPAQSLGSFVHCEPCDEKALSMCPPSPLGCELVKEPGCGCCMTCALAEGQSCGVYTERCAQGLRCLPRQDEEKPLHALLHGRGVCLNEKSYREQVKIERDSREHEEPTTSEMAEETYSPKIFRPKHTRISELKAEAVKKDRRKKLTQSKFVGGAENTAHPRIISAPEMRQESEQGPCRRHMEASLQELKASPRMVPRAVYLPNCDRKGFYKRKQCKPSRGRKRGICWCVDKYGMKLPGMEYVDGDFQCHTFDSSNVEXCVPPQPFPHPLPPPAPTPASASLHPRTPLISSHLREKYISIYLRKLRTSESLARAQLRKWQQQRCKKLKRHPPPLNGFLFEASWMNREGKRGRTRGREGKEVFV

SEQ ID NO: 1029 - protein, 298 aa, Homo Sapiens
  misc_feature (283)..(283): Xaa can be any naturally occurring amino acid
MERPSLRALLLGAAGLLLLLLPLSSSSSSDTCGPCEPASCPPLPPLGCLLGETRDACGCCPMCARGEGEPCGGGGAGRGYCAPGMECVKSRKRRKGKAGAAAGGPGVSGVCVCKSRYPVCGSDGTTYPSGCQLRAASQRAESRGEKAITQVSKGTCEQGPSIVTPPKDIWNVTGAQVYLSCEVIGIPTPVLIWNKVKRGHYGVQRTELLPGDRDNLAIQTRGGPEKHEVTGWVLVSPLSKEDAGEYECHASNSQGQASASAKITVVDALHEIPVKKGEGAELXTSRILLVCMVKSSHG

SEQ ID NO: 1030 - protein, 781 aa, Homo Sapiens
  misc_feature (757)..(757): Xaa can be any naturally occurring amino acid
MSWSPSLTTQTCGAWEMKERLGTGGFGNVIRWHNQETGEQIAIKQCRQELSPRNRERWCLEIQIMRRLTHPNVVAARDVPEGMQNLAPNDLPLLAMEYCQGGDLRKYLNQFENCCGLREGAILTLLSDIASALRYLHENRIIHRDLKPENIVLQQGEQRLIHKIIDLGYAKELDQGSLCTSFVGTLQYLAPELLEQQKYTVTVDYWSFGTLAFECITGFRPFLPNWQPVQWHSKVRQKSEVDIVVSEDLNGTVKFSSSLPYPNNLNSVLAERLEKWLQLMLMWHPRQRGTDPTYGPNGCFKALDDILNLKLVHILNMVTGTIHTYPVTEDESLQSLKARIQQDTGIPEEDQELLQEAGLALIPDKPATQCISDGKLNEGHTLDMDLVFLFDNSKITYETQISPRPQPESVSCILQEPKRNLAFFQLRKVWGQVWHSIQTLKEDCNRLQQGQRAAMMNLLRNNSCLSKMKNSMASMSQQLKAKLDFFKTSIQIDLEKYSEQTEFGITSDKLLLAWREMEQAVELCGRENEVKLLVERMMALQTDIVDLQRSPMGRKQGGTLDDLEEQARELYRRLREKPRDQRTEGDSQEMVRLLLQAIQSFEKKVRVIYTQLSKTVVCKQKALELLPKVEEVVSLMNEDEKTVVRLQEKRQKELWNLLKIACSKVRGPVSGSPDSMNASRLSQPGQLMSQPSTASNSLPEPAKKSEELVAEAHNLCTLLENAIQDTVREQDQSFTALDWSWLQTEEEEHSCLEQASXCGGTRPPDMGQPIAGLVQWGDSTP

SEQ ID NO: 1031 - protein, 353 aa, Homo Sapiens
  misc_feature (329)..(329): Xaa can be any naturally occurring amino acid
MCHQQLVISWFSLVFLASPLVAIWELKKDVYVVELDWYPDAPGEMVVLTCDTPEEDGITWTLDQSSEVLGSGKTLTIQVKEFGDAGQYTCHKGGEVLSHSLLLLHKKEDGIWSTDILKDQKEPKNKTFLRCEAKNYSGRFTCWWLTTISTDLTFSVKSSRGSSDPQGVTCGAATLSAERVRGDNKEYEYSVECQEDSACPAAEESLPIEVMVDAVHKLKYENYTSSFFIRDIIKPDPPKNLQLKPLKNSRQVEVSWEYPDTWSTPHSYFSLTFCVQVQGKSKREKKDRVFTDKTSATVICRKNASISVRAQDRYYSSSWSEWASVPCSXVLIQDENLEEKWKILSKMFKDTTE

SEQ ID NO: 1032 - protein, 221 aa, Homo Sapiens
  misc_feature (195)..(195): Xaa can be any naturally occurring amino acid
MTMRHNWTPDLSPLWVLLLCAHVVTLLVRATPVSQTTTAATASVRSTKDPCPSQPPVFPAAKQCPALEVTWPEVEVPLNGTLSLSCVACSRFPNFSILYWLGNGSFIEHLPGRLWEGSTSRERGSTGTQLCKALVLEQLTPALHSTNFSCVLVDPEQVVQRHVVLAQLWAGLRATLPPTQEALPSSHSSPQQQGXDSAQGQQQHNLDQSLGPTCLPGVNSP

SEQ ID NO: 1033 - protein, 420 aa, Homo Sapiens
  misc_feature (367)..(367): Xaa can be any naturally occurring amino acid
MVLHLLLFLLLTPQGGHSCQGLELARELVLAKVRALFLDALGPPAVTREGGDPGVRRLPRRHALGGFTHRGSEPEEEEDVSQAILFPATDASCEDKSAARGLAQEAEEGLFRYMFRPSQHTRSRQVTSAQLWFHTGLDRQGTAASNSSEPLLGLLALSPGGPVAVPMSLGHAPPHWAVLHLATSALSLLTHPVLVLLLRCPLCTCSARPEATPFLVAHTRTRPPSGGERARRSTPLMSWPWSPSALRLLQRPPEEPAAHANCHRVALNISFQELGWERWIVYPPSFIFHYCHGGCGLHIPPNLSLPVPGAPPTPAQPYSLLPGAQPCCAALPGTMRPLHVRTTSDGGYSFKYETVPNLLTQHCACIXGWGVFLLNPMAGGHAPTIISWEERQSWEIDGSHSSLLSLLCLWATLPTPLLSQ

SEQ ID NO: 1034 - protein, 375 aa, Homo Sapiens
  misc_feature (353)..(353): Xaa can be any naturally occurring amino acid
MTSSLLLAFLLLAPTTVATPRAGGQCPACGGPTLELESQRELLLDLAKRSILDKLHLTQRPTLNRPVSRAALRTALQHLHGVPQGALLEDNREQECEIISFAETGLSTINQTRLDFHFSSDRTAGDREVQQASLMFFVQLPSNTTWTLKVRVLVLGPHNTNLTLATQYLLEVDASGWHQLPLGPEAQAACSQGHLTLELVLEGQVAQSSVILGGAAHRPFVAARVRVGGKHQIHRRGIDCQGGSRMCCRQEFFVDFREIGWHDWIIQPEGYAMNFCIGQCPLHIAGMPGIAASFHTAVLNLLKANTAAGTTGGGSCCVPTARRPLSLLYYDRDSNIVKTDIPDMVVEACGCSXSMCGMGSPRLHGKTRPYRSALP

SEQ ID NO: 1035 - protein, 434 aa, Homo Sapiens
  misc_feature (351)..(351): Xaa can be any naturally occurring amino acid
MRLPDVQLWLVLLWALVRAQGTGSVCPSCGGSKLAPQAERALVLELAKQQILDGLHLTSRPRITHPPPQAALTRALRRLQPGSVAPGNGEEVISFATVTDSTSAYSSLLTFHLSTPRSHHLYHARLWLHVLPTLPGTLCLRIFRWGPRRRRQGSRTLLAEHHITNLGWHTLTLPSSGLRGEKSGVLKLQLDCRPLEGNSTVTGQPRRLLDTAGHQQPFLELKIRANEPGAGRARRRTPTCEPATPLCCRRDHYVDFQELGWRDWILQPEGYQLNYCSGQCPPHLAGSPGIAASFHSAVFSLLKANNPWPASTSCCVPTARRPLSLLYLDHNGNVVKTDVPDMVVEACGCSXQEDLGLWSEETKMKFPRHRASVTGGIRFLIHTPTQQPPGNMTHLTPMGPKWALSCLRLWLIPGWLMCWEMGKAFLLKGSTQKA

SEQ ID NO: 1036 - protein, 1269 aa, Homo Sapiens
  misc_feature (1243)..(1243): Xaa can be any naturally occurring amino acid
MASPPESDGFSDVRKVGYLRKPKSMHKRFFVLRAASEAGGPARLEYYENEKKWRHKSSAPKRSIPLESCFNINKRADSKNKHLVALYTRDEHFAIAADSEAEQDSWYQALLQLHNRAKGHHDGAAALGAGGGGGSCSGSSGLGEAGEDLSYGDVPPGPAFKEVWQVILKPKGLGQTKNLIGIYRLCLTSKTISFVKLNSEAAAVVLQLMNIRRCGHSENFFFIEVGRSAVTGPGEFWMQVDDSVVAQNMHETILEAMRAMSDEFRPRSKSQSSSNCSNPISVPLRRHHLNNPPPSQVGLTRRSRTESITATSPASMVGGKPGSFRVRASSDGEGTMSRPASVDGSPVSPSTNRTHAHRHRGSARLHPPLNHSRSIPMPASRCSPSATSPVSLSSSSTSGHGSTSDCLFPRRSSASVSGSPSDGGFISSDEYGSSPCDFRSSFRSVTPDSLGHTPPARGEEELSNYICMGGKGPSTLTAPNGHYILSRGGNGHRCTPGTGLGTSPALAGDEAASAADLDNRFRKRTHSAGTSPTITHQKTPSQSSVASIEEYTEMMPAYPPGGGSGGRLPGHRHSAFVPTRSYPEEGLEMHPLERRGGHHRPDSSTLHTDDGYMPMSPGVAPVPSGRKGSGDYMPMSPKSVSAPQQIINPIRRHPQRVDPNGYMMMSPSGGCSPDIGGGPSSSSSSSNAVPSGTSYGKLWTNGVGGHHSHVLPHPKPPVESSGGKLLPCTGDYMNMSPVGDSNTSSPSDCYYGPEDPQHKPVLSYYSLPRSFKHTQRPGEPEEGARHQHLRLSTSSGRLLYAATADDSSSSTSSDSLGGGYCGARLEPSLPHPHHQVLQPHLPRKVDTAAQTNSRLARPTRLSLGDPKASTLPRAREQQQQQQPLLHPPEPKSPGEYVNIEFGSDQSGYLSGPVAFHSSPSVRCPSQLQPAPREEETGTEEYMKMDLGPGRRAAWQESTGVEMGRLGPAPPGAASICRPTRAVPSSRGDYMTMQMSCPRQSYVDTSPAAPVSYADMRTGIAAEEVSLPRATMAAASSSSAASASPTGPQGAAELAAHSSLLGGPQGPGGMSAFTRVNLSPNRNQSAKVIRADPQGCRRRHSSETFSSTPSATRVGNTVPFGAGAAVGGGGGSSSSSEDVKRHSSASFENVWLRPGELGGAPKEPAKLCGAAGGLENGLNYIDLDLVKDFKQCPQECTPEPQPPPPPPPHQPLGSGESSSTRRSSEDLSAYASISFQKQPEDRQXLNWTSQQNEDLNDLSKSSSNSWVPRL

SEQ ID NO: 1037 - protein, 1038 aa, Homo Sapiens
  misc_feature (1033)..(1033): Xaa can be any naturally occurring amino acid
MAWEARREPGPRRAAVRETVMLLLCLGVPTGRPYNVDTESALLYQGPHNTLFGYSVVLHSHGANRWLLVGAPTANWLANASVINPGAIYRCRIGKNPGQTCEQLQLGSPNGEPCGKTCLEERDNQWLGVTLSRQPGENGSIVTCGHRWKNIFYIKNENKLPTGGCYGVPPDLRTELSKRIAPCYQDYVKKFGENFASCQAGISSFYTKDLIVMGAPGSSYWTGSLFVYNITTNKYKAFLDKQNQVKFGSYLGYSVGAGHFRSQHTTEVVGGAPQHEQIGKAYIFSIDEKELNILHEMKGKKLGSYFGASVCAVDLNADGFSDLLVGAPMQSTIREEGRVFVYINSGSGAVMNAMETNLVGSDKYAARFGESIVNLGDIDNDGFEDVAIGAPQEDDLQGAIYIYNGRADGISSTFSQRIEGLQISKSLSMFGQSISGQIDADNNGYVDVAVGAFRSDSAVLLRTRPVVIVDASLSHPESVNRTKFDCVENGWPSVCIDLTLCFSYKGKEVPGYIVLFYNMSLDVNRKAESPPRFYFSSNGTSDVITGSIQVSSREANCRTHQAFMRKDVRDILTPIQIEAAYHLGPHVISKRSTEEFPPLQPILQQKKEKDIMKKTINFARFCAHENCSADLQVSAKIGFLKPHENKTYLAVGSMKTLMLNVSLFNAGDDAYETTLHVKLPVGLYFIKILELEEKQINCEVTDNSGVVQLDCSIGYIYVDHLSRIDISFLLDVSSLSRAEEDLSITVHATCENEEEMDNLKHSRVTVAIPLKYEVKLTVHGFVNPTSFVYGSNDENEPETCMVEKMNLTFHVINTGNSMAPNVSVEIMVPNSFSPQTDKLFNILDVQTTTGECHFENYQRVCALEQQKSAMQTLKGIVRFLSKTDKRLLYCIKADPHCLNFLCNFGKMESGKEASVHIQLEGRPSILEMDETSALKFEIRATGFPEPNPRVIELNKDENVAHVLLEGLHHQRPKRYFTIVIISSSLLLGLIVLLLISYVMWKAGFFKRQYKSILQEENRRDSWSYINSKSNDDXGLLSN

SEQ ID NO: 1038 - protein, 936 aa, Homo Sapiens
  misc_feature (912)..(912): Xaa can be any naturally occurring amino acid
MDGAMGPRGLLLCMYLVSLLILQAMPALGSATGRSKSSEKRQAVDTAVDGVFIRSLKVNCKVTSRFAHYVVTSQVVNTANEAREVAFDLEIPKTAFISDFAVTADGNAFIGDIKDKVTAWKQYRKAAISGENAGLVRASGRTMEQFTIHLTVNPQSKVTFQLTYEEVLKRNHMQYEIVIKVKPKQLVHHFEIDVDIFEPQGISKLDAQASFLPKELAAQTIKKSFSGKKGHVLFRPTVSQQQSCPTCSTSLLNGHFKVTYDVSRDKICDLLVANNHFAHFFAPQNLTNMNKNVVFVIDISGSMRGQKVKQTKEALLKILGDMQPGDYFDLVLFGTRVQSWKGSLVQASEANLQAAQDFVRGFSLDEATNLNGGLLRGIEILNQVQESLPELSNHASILIMLTDGDPTEGVTDRSQILKNVRNAIRGRFPLYNLGFGHNVDFNFLEVMSMENNGRAQRIYEDHDATQQLQGFYSQVAKPLLVDVDLQYPQDAVLALTQNHHKQYYEGSEIVVAGRIADNKQSSFKADVQAHGEGQEFSITCLVDEEEMKKLLRERGHMLENHVERLWAYLTIQELLAKRMKVDREERANLSSQALQMSLDYGFVTPLTSMSIRGMADQDGLKPTIDKPSEDSPPLEMLGPRRTFVLSALQPSPTHSSSNTQRLPDRVTGVDTDPHFIIHVPQKEDTLCFNINEEPGVILSLVQDPNTGFSVNGQLIGNKARSPGQHDGTYFGRLGIANPATDFQLEVTPQNITLNPGFGGPVFSWRDQAVLRQDGVVVTINKKRNLVVSVDDGGTFEVVLHRVWKGSSVHQDFLGFYVLDSHRMSARTHGLLGQFFHPIGFEVSDIHPGSDPTKPDATMVVRNRRLTVTRGLQKDYSKDPWHGAEVSCWFIHNNGAGLIDGAYTDYIVPDIFXALWPARLSSPGAKAEEEDDILTCC

SEQ ID NO: 1039 - protein, 2716 aa, Homo Sapiens
  misc_feature (2672)..(2672): Xaa can be any naturally occurring amino acid
MSEMSSFLHIGDIVSLYAEGSVNGFISTLGLVDDRCVVEPAAGDLDNPPKKFRDCLFKVCPMNRYSAQKQYWKAKQTKQDKEKIADVVLLQKLQHAAQMEQKQNDTENKKVHGDVVKYGSVIQLLHMKSNKYLTVNKRLPALLEKNAMRVTLDATGNEGSWLFIQPFWKLRSNGDNVVVGDKVILNPVNAGQPLHASNYELSDNAGCKEVNSVNCNTSWKINLFMQFRDHLEEVLKGGDVVRLFHAEQEKFLTCDEYKGKLQVFLRTTLRQSATSATSSNALWEVEVVHHDPCRGGAGHWNGLYRFKHLATGNYLAAEENPSYKGDASDPKAAGMGAQGRTGRRNAGEKIKYCLVAVPHGNDIASLFELDPTTLQKTDSFVPRNSYVRLRHLCTNTWIQSTNVPIDIEEERPIRLMLGTCPTKEDKEAFAIVSVPVSEIRDLDFANDASSMLASAVEKLNEGFISQNDRRFVIQLLEDLVFFVSDVPNNGQNVLDIMVTKPNRERQKLMREQNILKQVFGILKAPFREKGGEGPLVRLEELSDQKNAPYQHMFRLCYRVLRHSQEDYRKNQEHIAKQFGMMQSQIGYDILAEDTITALLHNNRKLLEKHITKTEVETFVSLVRKNREPRFLDYLSDLCVSNHIAIPVTQELICKCVLDPKNSDILIRTELRPVKEMAQSHEYLSIEYSEEEVWLTWTDKNNEHHEKSVRQLAQEARAGNAHDENVLSYYRYQLKLFARMCLDRQYLAIDEISQQLGVDLIFLCMADEMLPFDLRASFCHLMLHVHVDRDPQELVTPVKFARLWTEIPTAITIKDYDSNLNASRDDKKNKFANTMEFVEDYLNNVVSEAVPFANEEKNKLTFEVVSLAHNLIYFGFYSFSELLRLTRTLLGIIDCVQGPPAMLQAYEDPGGKNVRRSIQGVGHMMSTMVLSRKQSVFSAPSLSAGASAAEPLDRSKFEENEDIVVMETKLKILEILQFILNVRLDYRISYLLSVFKKEFVEVFPMQDSGADGTAPAFDSTTANMNLDRIGEQAEAMFGVGKTSSMLEVDDEGGRMFLRVLIHLTMHDYAPLVSGALQLLFKHFSQRQEAMHTFKQVQLLISAQDVENYKVIKSELDRLRTMVEKSELWVDKKGSGKGEEVEAGAAKDKKERPTDEEGFLHPPGEKSSENYQIVKGILERLNKMCGVGEQMRKKQQRLLKNMDAHKVMLDLLQIPYDKGDAKMMEILRYTHQFLQKFCAGNPGNQALLHKHLHLFLTPGLLEAETMQHIFLNNYQLCSEISEPVLQHFVHLLATHGRHVQYLDFLHTVIKAEGKYVKKCQDMIMTELTNAGDDVVVFYNDKASLAHLLDMMKAARDGVEDHSPLMYHISLVDLLAACAEGKNVYTEIKCTSLLPLEDVVSVVTHEDCITEVKMAYVNFVNHCYVDTEVEMKEIYTSNHIWTLFENFTLDMARVCSKREKRVADPTLEKYVLSVVLDTINAFFSSPFSENSTSLQTHQTIVVQLLQSTTRLLECPWLQQQHKGSVEACIRTLAMVAKGRAILLPMDLDAHISSMLSSGASCAAAAQRNASSYKATTRAFPRVTPTANQWDYKNIIEKLQDIITALEERLKPLVQAELSVLVDVLHWPELLFLEGSEAYQRCESGGFLSKLIQHTKDLMESEEKLCIKVLRTLQQMLLKKTKYGDRGNQLRKMLLQNYLQNRKSTSRGDLPDPIGTGLDPDWSAIAATQCRLDKEGATKLVCDLITSTKNEKIFQESIGLAIHLLDGGNTEIQKSFHNLMMSDKKSERFFKVLHDRMKRAQQETKSTVAVNMNDLGSQPHEDREPVDPTTKGRVASFSIPGSSSRYSLGPSLRRGHEVSERVQSSEMGTSVLIMQPILRFLQLLCENHNRDLQNFLRCQNNKTNYNLVCETLQFLDIMCGSTTGGLGLLGLYINEDNVGLVIQTLETLTEYCQGPCHENQTCIVTHESNGIDIITALILNDISPLCKYRMDLVLQLKDNASKLLLALMESRHDSENAERILISLRPQELVDVIKKAYLQEEERENSEVSPREVGHNIYILALQLSRHNKQLQHLLKPVKRIQEEEAEGISSMLSLNNKQLSQMLKSSAPAQEEEEDPLAYYENHTSQIEIVRQDRSMEQIVFPVPGICQFLTEETKHRLFTTTEQDEQGSKVSDFFDQSSFLHNEMEWQRKLRSMPLIYWFSRRMTLWGSISFNLAVFINIIIAFFYPYMEGASTGVLDSPLISLLFWILICFSIAALFTKRYSIRPLIVALILRSIYYLGIGPTLNILGALNLTNKIVFVVSFVGNRGTFIRGYKAMVMDMEFLYHVGYILTSVLGLFAHELFYSILLFDLIYREETLFNVIKSVTRNGRSILLTALLALILVYLFSIVGFLFLKDDFILEVDRLPNNHSTASPLGMPHGAAAFVDTCSGDKMDCVSGLSVPEVLEEDRELDSTERACDTLLMCIVTVMNHGLRNGGGVGDILRKPSKDESLFPARVVYDLLFFFIVIIIVLNLIFGVIIDTFADLRSEKQKKEEILKTTCFICGLERDKFDNKTVSFEEHIKLEHNMWNYLYFIVLVRVKNKTDYTGPESYVAQMIKNKNLDWFPRMRAMSLVSNEGEGEQNEIRILQDKLNSTMKLVSHLTAQLNELKEQMTEQRKRRQRLGFVDVQNCISRXGEPPKAPTGDAHHWRLRLGRTLPPPSGWVAQPAGQPPLPLCQTP

SEQ ID NO: 1040 - protein, 464 aa, Homo Sapiens
  misc_feature (424)..(424): Xaa can be any naturally occurring amino acid
MAKLTESMTNVLEGDSMDQDVESPVAIHQPKLPKQARDDLPRHISRDRTKRKIQRYVRKDGKCNVHHGNVRETYRYLTDIFTTLVDLKWRFNLLIFVMVYTVTWLFFGMIWWLIAYIRGDMDHIEDPSWTPCVTNLNGFVSAFLFSIETETTIGYGYRVITDKCPEGIILLLIQSVLGSIVNAFMVGCMFVKISQPKKRAETLVFSTHAVISMRDGKLCLMFRVGDLRNSHIVEASIRAKLIKSKQTSEGEFIPLNQTDINVGYYTGDDRLFLVSPLIISHEINQQSPFWEISKAQLPKEELEIVVILEGMVEATGMTCQARSSYITSEILWGYRFTPVLTLEDGFYEVDYNSFHETYETSTPSLSAKELAELASRAELPLSWSVSSKLNQHAELETEEEEKNLEEQTERNGDVANLENESKVXCPSWANPSLLPPTQSFLVSHSLSFSVSLALFFICLYLIFT

SEQ ID NO: 1041 - protein, 2274 aa, Homo Sapiens
  misc_feature (2236)..(2236): Xaa can be any naturally occurring amino acid
MPLFFSALLVLLLVALSALFLGRWLVVRLATKWCQRKLQAELKIGSFRFFWIQNVSLKFQQHQQTVEIDNLWISSKLLSHDLPHYVALCFGEVRIRTDLQKVSDLSAPFSQSAGVDQKELSFSPSLLKIFCQLFSIHVDAINIMVLKVDTSESLWHIQISRSRFLLDSDGKRLICEVSLCKINSKVLKSGQLEDTCLVELSLALDLCLKVGISSRHLTAITVDVWTLHAELHEGLFQSQLLCQGPSLASKPVPCSEVTENLVEPTLPGLFLLQQLPDQVKVKMENTSVVLSMNSQKRHLTWTLKLLQFLYHRDEDQLPLRSFTANSDMAQMSTELLLEDGLLLSQSRQRIVCLNSLKASVQVTTIDLSASLVLNTCIIHYRHQEFSHWLHLLALETQGSSSPVLKQRKKRTFPQILAPIIFSTSISNVNISIQLGDTPPFALGFNSISLDYQHLRPQSIHQRGVLTVDHLCWRVGSDSHIQRAPHPPNMHVWGEALVLDSFTLQGSYNQPLGLSSTQSDTLFLDCTIRGLQVEASDTCAQCLSRILSLMGPQSGKSAVSRHSSFGESVSLLWKVDLKVEDMNLFTLSALVGASEVRLDTLTILGSAETSTVGIQGLVLALVKSVTEKMQPCCKAPDIPTPVLSLSMLSITYHSSIRSLEVQCGAGLTLLWSPPDHMYLYQHVLATLQCRDLLRATVFPETVPSLALETSGTTSELEGRAPEPLPPKRLLNLTLEVSTAKLTAFVAEDKFITLAAESVSLSRHGGSLQAYCPELAAGFDGNSIFNFKEVEVQLLPELEEMILHRNPFPALQTLRNRVWLLSFGSVSVEFPYQYDFSRTLDEAVGVQKWLKGLHQGTRAWASPSPVPLPPDLLLKVEHFSWVFLDDVFEVKLHDNYELMKDESKESAKRLQLLDAKVAALRKQHGELLPARKIEELYASLERKNIEIYIQRSRRLYGNTPMRRALLTWSLAGLELVALADASFHGPEHVVEQVQELDPGSPFPPEGLDLVIQWCRMLKCNVKSFLVRIRDYPRYLFEIRDWRLMGRLVGTEQSGQPCSRRRQILHLGLPWGNVAVERNMPPLKFYHDFHSEIFQYTVVWGPCWDPAWTLIGQCVDLLTKPSADPSPPLPWWDKSRLLFHGDWHMDIEQANLHQLATEDPYNTTENMHWEWSHLSFHWKPGQFVFKGDLDINVRTASKYDDCCFLHLPDLCMTLDLQWLCHGNPHDHHSVTLRAPEFLPEVPLGQLHDSYRAFRSENLNLSIKMDLTRHSGTISQPRILLYSSTLRWMQNFWATWTSVTRPICRGKLFNNLKPSKKKLGQHYKQLSYTALFPQLQVHYWASFAQQRGIQIECSQGHVFTRGTQRLIPQAGTVMRRLISDWSVTQMVSDLSQVTVHLMASPTEENADHCLDPLVTKTHLLSLSSLTYQRHSNRTAEEELSARDGDPTFHTHQLHLVDLRISWTTTNRDIAFGLYDGYKKAAVLKRNLSTEALKGLKIDPQMPAKKPKRGVPTSASAPPRVNTPSFSGQPDKGSSGGAYMLQKLIEETDRFVVFTEEESGMSDQLCGIAACQTDDIYNRNCLIELVNCQMVLRGAETEGCVIVSAAKAQLLQCQHHPAWYGDTLKQKTSWTCLLDGMQYFATTESSPTEQDGRQLWLEVKNIEEHRQRSLDSVQELMESGQAVGGMVTTTTDWNQPAEAQQAQQVQRIISRCNCRMYYISYSHDIDPELATQIKPPEVLENQEKEDLLKKQEGAVDTFTLIHHELEISTNPAQYAMILDIVNNLLLHVEPKRKEHSEKKQRVRFQLEISSNPEEQRSSILHLQEAVRQHVAQIRQLEKQMYSIMKSLQDDSKNENLLDLNQKLQLQLNQEKANLQLESEELNILIRCFKDFQLQRANKMELRKQQEDVSVVRRTEFYFAQARWRLTEEDGQLGIAELELQRFLYSKVNKSDDTAEHLLELGWFTMNNLLPNAVYKVVLRPQSSCQSGRQLALRLFSKVRPPVGGISVKEHFEVNVVPLTIQLTHQFFHRMMGFFFPGRSVEDDEVGDEEDKSKLVTTGIPVVKPRQLIATDDAVPLGPGKGVAQGLTRSSGVRRSFRKSPEHPVDDIDKMKERAAMNNSFIYIKIPQVPLCVSYKGEKNSVDWGDLNLVLPCLEYHNNTWTWLDFAMAVKRDSRKALVAQVIKEKLRLKSATGSEVRGKLETKSDLNMQQQEEEEKARLLIGLSVGDKNPGKKSIFGRRKXFGDSSGCSTGSDSGSGSRDLWGGRGFPLSTRICGCQSP

SEQ ID NO: 1042 - protein, 1371 aa, Homo Sapiens
  misc_feature (1357)..(1357): Xaa can be any naturally occurring amino acid
MDLKEKHLGEPPSALGLSTRKALSVLKEQLEAVLEGHLRERKKCLTWKEVWRSSFLHHSNRCSCFHWPGASLMLLAVLLLLGCCGGQPAGSRGVGLVNASALFLLLLLNLVLIGRQDRLKRREVERRLRGIIDQIQDALRDGREIQWPSAMYPDLHMPFAPSWSLHWAYRDGHLVNLPVSLLVEGDIIALRPGQESFASLRGIKDDEHIVLEPGDLFPPFSPPPSPRGEVERGPQSPQQHRLFRVLETPVIDNIRWCLDMALSRPVTALDNERFTVQSVMLHYAVPVVLAGFLITNALRFIFSAPGVTSWQYTLLQLQVNGVLPILPLLFPVLWVLATACGEARVLAQMSKASPSSLLAKFSEDTLSSYTEAVSSQEMLRCIWGHFLRVLGGTSPTLSHSSSLLHSLGSVTVLCCVDKQGILSWPNPSPETVLFFSGKVEPPHSSHEDLTDGLSTRSFCHPEPHERDALLAGSLNNTLHLSNEQERGDWPGEAPKPPEPYSHHKAHGRSKHPSGSNVSFSRDTEGGEEEPSKTQPGMESDPYEAEDFVCDYHLEMLSLSQDQQNPSCIQFDDSNWQLHLTSLKPLGLNVLLNLCDASVTERLCRFSDHLCNIALQESHSAVLPVHVPWGLCELARLIGFTPGAKELFKQENHLALYRLPSAETMKETSLGRLSCVTKRRPPLSHMISLFIKDTTTSTEQMLSHGTADVVLEACTDFWDGADIYPLSGSDRKKVLDFYQRACLSGYCSAFAYKPMNCALSSQLNGKCIELVQVPGQSSIFTMCELPSTIPIKQNARRSSWSSDEGIGEVLEKEDCMQALSGQIFMGMVSSQYQARLDIVRLIDGLVNACIRFVYFSLEDELKSKVFAEKMGLETGWNCHISLTPNGDMPGSEIPPSSPSHAGSLHDDLNQVSRDDAEGLLLMEEEGHSDLISFQPTDSDIPSFLEDSNRAKLPRGIHQVRPHLQNIDNVPLLVPLFTDCTPETMCEMIKIMQEYGEVTCCLGSSANLRNSCLFLQSDISIALDPLYPSRCSWETFGYATSISMAQASDGLSPLQLSGQLNSLPCSLTFRQEETISIIRLIEQARHATYGIRKCFLFLLQCQLTLVVIQFLSCLVQLPPLLSTTDILWLSCFCYPLLSISLLGKPPHSSIMSMATGKNLQSIPKKTQHYFLLCFLLKFSLTISSCLICFGFTLQSFCDSSRDRNLTNCSSVMLPSNDDRAPAWFEDFANGLLSAQKLTAALIVLHTVFISITHVHRTKPLWRKSPLTNLWWAVTVPVVLLGQVVQTAVDLQLWTHRDSHVHFGLEDVPLLTWLLGCLSLVLVVVTNEIVKLHEIRVRVRYQKRQKLQFETKLGMNSPFXATGCGGCSCPRPWG

SEQ ID NO: 1043 - protein, 1099 aa, Homo Sapiens
  misc_feature (1071)..(1071): Xaa can be any naturally occurring amino acid
MYCCSAQDSKMDYKRRFLLGGSKQKVQQHQQYPMPELGRALSAPLASTATTAPLGSLTAAGSCHHAMPHTTPIADIQQGISKYLDALNVFCRASTFLTDLFSTVFRNSHYSKAATQLKDVQEHVMEAASRLTSAIKPEIAKMLMELSAGAANFTDQKEFSLQDIEVLGRCFLTVVQVHFQFLTHALQKVQPVAHSCFAEVIVPEKKNSGSGGGLSGMGHTPEVEEAVRSWRGAAEATSRLRERGCDGCLAGIEVQQLFCSQSAAIPEHQLKELNIKIDSALQAYKIALESLGHCEYAMKAGFHLNPKAIEASLQGCCSEAEAQQTGRRQTPPQPMQCELPTVPVQIGSHFLKGVSFNESAADNLKLKTHTMLQLMKEAGCYNGITSRDDFPVTEVLNQVCPSTWRGACKTAVQLLFGQAGLVVVDTAQIENKEAYAPQISLEGSRIVVQVPSTWCLKEDPATMSLLQRSLDPEKTLGLVDVLYTAVLDLNRWRAGREQALPCIQIQLQREICDFGNQADLPSGNGNKSSGGLQKTFSKLTSRFTKKASCTSSSSSTNYSIQNTPSKNIFIAGCSEEKAKMPGNIDTRLQSILNIGNFPRTTDPSQSAQNSSNTVANGFLMERRENFLHGDDGKDEKGMNLPTDQEMQEVIDFLSGFNMGQSHQGSPLVTRHNSAATAMVTEQKAGAMQPQQPSLPVPPPPRAPQAGAHTPLTPQPGLAPQQQSPKQQQPQVQYYQHLLQPIGPQQPPPQPRAPGKWVHGSSQQPAQAVGAGLSPLGQWPGISDLSSDLYSLGLVSSYMDNVMSEVLGQKPQGPRNNTWPNRDQSDGVFGMLGEILPFDPAVGSDPEFARYVAGVSQAMQQKRQAQHGRRPGNPRGNWPPMDDAHRTWPFPEFFTEGDGLHGGWSGAQGDSASSSDETSSANGDSLFSMFSGPDLVAAVKQRRKHSSGEQDTSTLPSPPLLTTVEDVNQDNKTKTWPPKAPWQHPSPLPSTLPSPSAPLYAVTSPGSQWNDTMQMLQSPVWAATNDCSAAAFSYVQTPPQPPPPPAHKAAPKGFKAFPGKGERRPAYLPQYXPQASQPACLPACPPRAVGMSVPTPGPLS

SEQ ID NO: 1044 - protein, 1228 aa, Homo Sapiens
  misc_feature (1210)..(1210): Xaa can be any naturally occurring amino acid
MFLMNASPVVALQSKWEAFGPPGSCRFPRCFSEADEGVESASVSARVQMLISTLQRDGAARGTSDERAAQRGHRAEGCHDARPAAKPTVHKEPPALAVCGLVADFDPMGEEETTDFGPLVLDSDSDDSVDRDIEEAIQEYLKAKSGAAQPGAGGAQPGAAQPSRAAGGGSRCKPEPAHGSAPTALCPPKLVPGSGGGPGSQVGSSKDQGSASPVSVSSDDSFEQSIRAEIEQFLNEKRQHETQKCDGSVEKKPDTNENSAKSLLKSHQEPPTKVVHRQGLLGVQKEFAFRKPPRLAKMNVQPRSLRSKVTTTQENEGSTKPATPCRPSEAAQNKGGIKRSASAARRGKRVMSAAQASEASDSSSDDGIEEAIQLYQLQKTRKEADGDLPQRVQLREERAPDPPAHSTSSATKSALPETHRKTPSKKKLVATKTMDPGPGGLDTDHAPKLLKETKAPPPASPASRSEFVERSSCRADTSAELMCAEAILDISKTILPAPVEGSDGSLSASPLFYSPNVPSRSDGDSSSVDSDDSIEQEIRTFLALKAQSGSLLARGESCPQAAQGPLLPPGLNSQTGGHKTPLSKTPDPLLGCKRKRRGGGHVRPSTPKKMQEVVKDGSQDADHSQGRAEPGHERRDLPIQGKASEALGGEGTARGPGDTRMSQGQGKTDEARRLDEKESSEDKSSSLDSDEDLDTAIKDLLRSKRKLKKRCREPRAACRKKVRFSTAQTHFLEQLGGLRRDWKDRGPPVLKSCLSKSKRDSGEGPGKKPPSVFGSTAERMRQEGAASQDAALAFRVRRPASASASEGNPFPRESQGPAPSPGSLSDDSSSVDSNDSIELEIRKFLAEKAKESVSSSEVQAEGPTALGTGGPARPEVLCRKEPAPPPGVCTRSQRARGVPHLAEGLRGTESAGAQGTAGLFSQGGKGLPAAPARGDPVPPRSTSGGVSAKGLSVSRRNVYVHKDQSPRGAEPAAKSAFGQLPSCATAGTEAGGARGTFHMGCGSPSFLTPSPGAERDAGAQADRTPPWSDFAHQSRLPSPWVLRSEGRDAVWRGGVGSERDKGSEGPARGLPSLPLAGFSPLLSTQLFHFGKGVSWGGRQAGLFSPHLGLPLQGPSFSAFREAQAGPSPVFGSPHLLAKKDGGPWPTRKAQAGLSLHDRRSSGSEESILDLRYRRRVNRDDQEQDALGSDASDFSDTSTEDSGGSSVVKVXALELWVRVLGCVHSWKAA

SEQ ID NO: 1045 - protein, 903 aa, Homo Sapiens
  misc_feature (857)..(857): Xaa can be any naturally occurring amino acid
MKSARAKTPRKPTVKKGSQTNLKDPVGVYCRVRPLGFPDQECCIEVINNTTVQLHTPEGYRLNRNGDYKETQYSFKQVFGTHTTQKELFDVVANPLVNDLIHGKNGLLFTYGVTGSGKTHTMTGSPGEGGLLPRCLDMIFNSIGSFQAKRYVFKSNDRNSMDIQCEVDALLERQKREAMPNPKTSSSKRQVDPEFADMITVQEFCKAEEVDEDSVYGVFVSYIEIYNNYIYDLLEEVPFDPIKPKPPQSKLLREDKNHNMYVAGCTEVEVKSTEEAFEVFWRGQKKRRIANTHLNRESSRSHSVFNIKLVQAPLDADGDNVLQEKEQITISQLSLVDLAGSERTNRTRAEGNRLREAGNINQSLMTLRTCMDVLRENQMYGTNKMVPYRDSKLTHLFKNYFDGEGKVRMIVCVNPKAEDYEENLQVMRFAEVTQEVEVARPVDKAICGLTPGRRYRNQPRGPVGNEPLVTDVVLQSFPPLPSCEILDINDEQTLPRLIEALEKRHNLRQMMIDEFNKQSNAFKALLQEFDNAVLSKENHMQGKLNEKEKMISGQKLEIERLEKKNKTLEYKIEILEKTTTIYEEDKRNLQQELETQNQKLQRQFSDKRRLEARLQGMVTETTMKWEKECERRVAAKQLEMQNKLWVKDEKLKQLKAIVTEPKTEKPERPSRERDREKVTQRSVSPSPVPLLFQPDQNAPPIRLRHRRSRSAGDRWVDHKPASNMQTETVMQPHVPHAITVSVANEKALAKCEKYMLTHQELASDGEIETKLIKGDIYKTRGGGQSVQFTDIETLKQESPNGSRKRRSSTVAPAQPDGAESEWTDVETRCSVAVEMRAGSQLGPGYQHHAQPKRKKPXTDSPSTERTFSFVWMISRKPCQKQSSRSSCRTPALLKITDLSYIIH

SEQ ID NO: 1046 - protein, 1007 aa, Homo Sapiens
  misc_feature (961)..(961): Xaa can be any naturally occurring amino acid
MKSARAKTPRKPTVKKGSQTNLKDPVGVYCRVRPLGFPDQECCIEVINNTTVQLHTPEGYRLNRNGDYKETQYSFKQVFGTHTTQKELFDVVANPLVNDLIHGKNGLLFTYGVTGSGKTHTMTGSPGEGGLLPRCLDMIFNSIGSFQAKRYVFKSNDRNSMDIQCEVDALLERQKREAMPNPKTSSSKRQVDPEFADMITVQEFCKAEEVDEDSVYGVFVSYIEIYNNYIYDLLEEVPFDPIKPKPPQSKLLREDKNHNMYVAGCTEVEVKSTEEAFEVFWRGQKKRRIANTHLNRESSRSHSVFNIKLVQAPLDADGDNVLQEKEQITISQLSLVDLAGSERTNRTRAEGNRLREAGNINQSLMTLRTCMDVLRENQMYGTNKMVPYRDSKLTHLFKNYFDGEGKVRMIVCVNPKAEDYEENLQVMRFAEVTQEVEVARPVDKAICGLTPGRRYRNQPRGPVGNEPLVTDVVLQSFPPLPSCEILDINDEQTLPRLIEALEKRHNLRQMMIDEFNKQSNAFKALLQEFDNAVLSKENHMQGKLNEKEKMISGQKLEIERLEKKNKTLEYKIEILEKTTTIYEEDKRNLQQELETQNQKLQRQFSDKRRLEARLQGMVTETTMKWEKECERRVAAKQLEMQNKLWVKDEKLKQLKAIVTEPKTEKPERPSRERDREKVTQRSVSPSPVPLSSNYIAQISNGQQLMSQPQLHRRSNSCSSISVASCISEWEQKIPTYNTPLKVTSIARRRQQEPGQSKTCIVSDRRRGMYWTEGREVVPTFRNEIEIEEDHCGRLLFQPDQNAPPIRLRHRRSRSAGDRWVDHKPASNMQTETVMQPHVPHAITVSVANEKALAKCEKYMLTHQELASDGEIETKLIKGDIYKTRGGGQSVQFTDIETLKQESPNGSRKRRSSTVAPAQPDGAESEWTDVETRCSVAVEMRAGSQLGPGYQHHAQPKRKKPXTDSPSTERTFSFVWMISRKPCQKQSSRSSCRTPALLKITDLSYIIH

SEQ ID NO: 1047 - protein, 704 aa, Homo Sapiens
  misc_feature (700)..(700): Xaa can be any naturally occurring amino acid
MPINKSEKPESCDNVKVVVRCRPLNEREKSMCYKQAVSVDEMRGTITVHKTDSSNEPPKTFTFDTVFGPESKQLDVYNLTARPIIDSVLEGYNGTIFAYGQTGTGKTFTMEGVRAIPELRGIIPNSFAHIFGHIAKAEGDTRFLVRVSYLEIYNEEVRDLLGKDQTQRLEVKERPDVGVYIKDLSAYVVNNADDMDRIMTLGHKNRSVGATNMNEHSSRSHAIFTITIECSEKGIDGNMHVRMGKLHLVDLAGSERQAKTGATGQRLKEATKINLSLSTLGNVISALVDGKSTHVPYRNSKLTRLLQDSLGGNSKTMMCANIGPADYNYDETISTLRYANRAKNIKNKARINEDPKDALLRQFQKEIEELKKKLEEGEEISGSDISGSEEDDDEEGEVGEDGEKRKKRRGKKKVSPDKMIEMQAKIDEERKALETKLDMEEEERNKARAELEKREKDLLKAQQEHQSLLEKLSALEKKVIVGGVDLLAKAEEQEKLLEESNMELEERRKRAEQLRRELEEKEQERLDIEEKYTSLQEEAQGKTKKLKKVWTMLMAAKSEMADLQQEHQREIEGLLENIRQLSRELRLQMLIIDNFIPRDYQEMIENYVHWNEDIGEWQLKCVAYTGNNMRKQTPVPDKKEKDPFEVDLSHVYLAYTEESLRQSLMKLERPRTSKGKARPKTGRRKRSAKPETVIDSLLQXMLQT

SEQ ID NO: 1048 - protein, 1257 aa, Homo Sapiens
  misc_feature (1233)..(1233): Xaa can be any naturally occurring amino acid
MKEEVKGIPVRVALRCRPLVPKEISEGCQMCLSFVPGEPQVVVGTDKSFTYDFVFDPSTEQEEVFNTAVAPLIKGVFKGYNATVLAYGQTGSGKTYSMGGAYTAEQENEPTVGVIPRVIQLLFKEIDKKSDFEFTLKVSYLEIYNEEILDLLCPSREKAQINIREDPKEGIKIVGLTEKTVLVALDTVSCLEQGNNSRTVASTAMNSQSSRSHAIFTISLEQRKKSDKNSSFRSKLHLVDLAGSERQKKTKAEGDRLKEGININRGLLCLGNVISALGDDKKGGFVPYRDSKLTRLLQDSLGGNSHTLMIACVSPADSNLEETLNTLRYADRARKIKNKPIVNIDPQTAELNHLKQQVQQLQVLLLQAHGGTLPGSITVEPSENLQSLMEKNQSLVEENEKLSRGLSEAAGQTAQMLERIILTEQANEKMNAKLEELRQHAACKLDLQKLVETLEDQELKENVEIICNLQQLITQLSDETVACMAAAIDTAVEQEAQVETSPETSRSSDAFTTQHALRQAQMSKELVELNKALALKEALARKMTQNDSQLQPIQYQYQDNIKELELEVINLQKEKEELVLELQTAKKDANQAKLSERRRKRLQELEGQIADLKKKLNEQSKLLKLKESTERTVSKLNQEIRMMKNQRVQLMRQMKEDAEKFRQWKQKKDKEVIQLKERDRKRQYELLKLERNFQKQSNVLRRKTEEAAAANKRLKDALQKQREVADKRKETQSRGMEGTAARVKNWLGNEIEVMVSTEEAKRHLNDLLEDRKILAQDVAQLKEKKESGENPPPKLRRRTFSLTEVRGQVSESEDSITKQIESLETEMEFRSAQIADLQQKLLDAESEDRPKQRWENIATILEAKCALKYLIGELVSSKIQVSKLESSLKQSKTSCADMQKMLFEERNHFAEIETELQAELVRMEQQHQEKVLYLLSQLQQSQMAEKQLEESVSEKEQQLLSTLKCQDEELEKMREVCEQNQQLLRENEIIKQKLTLLQVASRQKHLPKDTLLSPDSSFEYVPPKPKPSRVKEKFLEQSMDIEDLKYCSEHSVNEHEDGDGDDDEGDDEEWKPTKLVKVSRKNIQGCSCKGWCGNKQCGCRKQKSDCGVDCCCDPTKCRNRQQGKDSLGTVERTQDSEGSFKLEDPTEVTPGLSFFNPVCATPNSKILKEMCDVEQVLSKKTPPAPSPFDLPELKHVATEYQENKAPGKKKKRALASNTSFFSGCSPIEEEAHXSWSHHLYPQSGLGDAFRLQPEGVF

SEQ ID NO: 1049 - protein, 1078 aa, Homo Sapiens
  misc_feature (1033)..(1033): Xaa can be any naturally occurring amino acid
MAETNNECSIKVLCRFRPLNQAEILRGDKFIPIFQGDDSVVIGGKPYVFDRVFPPNTTQEQVYHACAMQIVKDVLAGYNGTIFAYGQTSSGKTHTMEGKLHDPQLMGIIPRIARDIFNHIYSMDENLEFHIKVSYFEIYLDKIRDLLDVTKTNLSVHEDKNRVPFVKGCTERFVSSPEEILDVIDEGKSNRHVAVTNMNEHSSRSHSIFLINIKQENMETEQKLSGKLYLVDLAGSEKVSKTGAEGAVLDEAKNINKSLSALGNVISALAEGTKSYVPYRDSKMTRILQDSLGGNCRTTMFICCSPSSYNDAETKSTLMFGQRAKTIKNTASVNLELTAEQWKKKYEKEKEKTKAQKETIAKLEAELSRWRNGENVPETERLAGEEAALGAELCEETPVNDNSSIVVRIAPEERQKYEEEIRRLYKQLDDKDDEINQQSQLIEKLKQQMLDQEELLVSTRGDNEKVQRELSHLQSENDAAKDEVKEVLQALEELAVNYDQKSQEVEEKSQQNQLLVDELSQKVATMLSLESELQRLQEVSGHQRKRIAEVLNGLMKDLSEFSVIVGNGEIKLPVEISGAIEEEFTVARLYISKIKSEVKSVVKRCRQLENLQVECHRKMEVTGRELSSCQLLISQHEAKIRSLTEYMQSVELKKRHLEESYDSLSDELAKLQAQETVHEVALKDKEPDTQDADEVKKALELQMESHREAHHRQLARLRDEINEKQKTIDELKDLNQKLQLELEKLQADYEKLKSEEHEKSTKLQELTFLYERHEQSKQDLKGLEETVARELQTLHNLRKLFVQDVTTRVKKSAEMEPEDSGGIHSQKQKISFLENNLEQLTKVHKQLVRDNADLRCELPKLEKRLRATAERVKALEGALKEAKEGAMKDKRRYQQEVDRIKEAVRYKSSGKRGHSAQIAKPVRPGHYPASSPTNPYGTRSPECISYTNSLFQNYQNLYLQATPSSTSDMYFANSCTSSGATSSGGPLASYQKANMDNGNATDINDNRSDLPCGYEAEDQAKLFPLHQETAASXSPTPTAAYLHFQFLRGTEASSQHAANLWSLILTPSPTPVVGLYYV

SEQ ID NO: 1050 - protein, 367 aa, Homo Sapiens
  misc_feature (289)..(289): Xaa can be any naturally occurring amino acid
MAAAAYVDHFAAECLVSMSSRAVVHGPREGPESRPEGAAVAATPTLPRVEERRDGKDSASLFVVARILADLNQQAPAPAPAERREGAAARKARTPCRLPPPAPEPTSPGAEGAAAAPPSPAWSEPEPEAGLEPEREPGPAGSGEPGLRQRVRRGRSRADLESPQRKHKCHYAGCEKVYGKSSHLKAHLRTHTGERPFACSWQDCNKKFARSDELARHYRTHTGEKKFSCPICEKRFMRSDHLTKHARRHANFHPGMLQRRGGGSRTGSLSDYSRSDASSPTISPASSPXARHSHEQPLPPPRESLAFPFVIRKKRENLMQSPRKNNFFHLRCQSKFVKKTKKTQKFQKTPPTKLHNRYTHKVEIQRC

SEQ ID NO: 1051 - protein, 342 aa, Homo Sapiens
  misc_feature (303)..(303): Xaa can be any naturally occurring amino acid
MDVLASYSIFQELQLVHDTGYFSALPSLEETWQQTCLELERYLQTEPRRISETFGEDLDCFLHASPPPCIEESFRRLDPLLLPVEAAICEKSSAVDILLSRDKLLSETCLSLQPASSSLDSYTAVNQAQLNAVTSLTPPSSPELSRHLVKTSQTLSAVDGTVTLKLVAKKAALSSVKVGGVATAAAAVTAAGAVKSGQSDSDQGGLGAEACPENKKRVHRCQFNGCRKVYTKSSHLKAHQRTHTGEKPYKCSWEGCEWRFARSDELTRHYRKHTGAKPFKCNHCDRCFSRSDHLALHMKRHIXKTERPELPWHRLVSKGNAMRQGAGLQAGTHCLAEESSHL

SEQ ID NO: 1052 - protein, 438 aa, Homo Sapiens
  misc_feature (428)..(428): Xaa can be any naturally occurring amino acid
MKLITILFLCSRLLLSLTQESQSEEIDCNDKDLFKAVDAALKKYNSQNQSNNQFVLYRITEATKTVGSDTFYSFKYEIKEGDCPVQSGKTWQDCEYKDAAKAATGECTATVGKRSSTKFSVATQTCQITPAEGPVVTAQYDCLGCVHPISTQSPDLEPILRHGIQYFNNNTQHSSLFMLNEVKRAQRQVVAGLNFRITYSIVQTNCSKENFLFLTPDCKSLWNGDTGECTDNAYIDIQLRIASFSQNCDIYPGKDFVQPPTKICVGCPRDIPTNSPELEETLTHTITKLNAENNATFYFKIDNVKKARVQVVAGKKYFIDFVARETTCSKESNEELTESCETKKLGQSLDCNAEVYVVPWEKKIYPTVNCQPLGMISLMKRPPGFSPFRSSRIGEIKEETTSHLRSCEYKGRPPKAGAEPASEREVSXPMGRIFTPGT

SEQ ID NO: 1053 - protein, 714 aa, Homo Sapiens
  misc_feature (645)..(645): Xaa can be any naturally occurring amino acid
MSRQFSSRSGYRSGGGFSSGSAGIINYQRRTTSSSTRRSGGGGGRFSSCGGGGGSFGAGGGFGSRSLVNLGGSKSISISVARGGGRGSGFGGGYGGGGFGGGGFGGGGFGGGGIGGGGFGGFGSGGGGFGGGGFGGGGYGGGYGPVCPPGGIQEVTINQSLLQPLNVEIDPEIQKVKSREREQIKSLNNQFASFIDKVRFLEQQNQVLQTKWELLQQVDTSTRTHNLEPYFESFINNLRRRVDQLKSDQSRLDSELKNMQDMVEDYRNKYEDEINKRTNAENEFVTIKKDVDGAYMTKVDLQAKLDNLQQEIDFLTALYQAELSQMQTQISETNVILSMDNNRSLDLDSIIAEVKAQYEDIAQKSKAEAESLYQSKYEELQITAGRHGDSVRNSKIEISELNRVIQRLRSEIDNVKKQISNLQQSISDAEQRGENALKDAKNKLNDLEDALQQAKEDLARLLRDYQELMNTKLALDLEIATYRTLLEGEESRMSGECAPNVSVSVSTSHTTISGGGSRGGGGGGYGSGGSSYGSGGGSYGSGGGGGGGRGSYGSGGSSYGSGGGSYGSGGGGGGHGSYGSGSSSGGYRGGSGGGGGGSSGGRGSGGGSSGGSIGGRGSSSGGVKSSGGSSSVKFVSTTYSGVTRXRDALCFISSSSPPASLTNMLGKTEVDLSQPYRRKELWLVTLAHPIPPALSFLLFPNEVFRSVAISVPWL

SEQ ID NO: 1054 - protein, 1378 aa, Homo Sapiens
  misc_feature (1358)..(1358): Xaa can be any naturally occurring amino acid
MEFYESAYFIVLIPSIVITVIFLFFWLFMKETLYDEVLAKQKREQKLIPTKTDKKKAEKKKNKKKEIQNGNLHESDSESVPRDFKLSDALAVEDDQVAPVPLNVVETSSSVRERKKKEKKQKPVLEEQVIKESDASKIPGKKVEPVPVTKQPTPPSEAAASKKKPGQKKSKNGSDDQDKKVETLMVPSKRQEALPLHQETKQESGSGKKKASSKKQKTENVFVDEPLIHATTYIPLMDNADSSPVVDKREVIDLLKPDQVEGIQKSGTKKLKTETDKENAEVKFKDFLLSLKTMMFSEDEALCVVDLLKEKSGVIQDALKKSSKGELTTLIHQLQEKDKLLAAVKEDAAATKDRCKQLTQEMMTEKERSNVVITRMKDRIGTLEKEHNVFQNKIHVSYQETQQMQMKFQQVREQMEAEIAHLKQENGILRDAVSNTTNQLESKQSAELNKLRQDYARLVNELTEKTGKLQQEEVQKKNAEQAATQLKVQLQEAERRWEEVQSYIRKRTAEHEAAQQDLQSKFVAKENEVQSLHSKLTDTLVSKQQLEQRLMQLMESEQKRVNKEESLQMQVQDILEQNEALKAQIQQFHSQIAAQTSASVLAEELHKVIAEKDKQIKQTEDSLASERDRLTSKEEELKDIQNMNFLLKAEVQKLQALANEQAAAAHELEKMQQSVYVKDDKIRLLEEQLQHEISNKMEEFKILNDQNKALKSEVQKLQTLVSEQPNKDVVEQMEKCIQEKDEKLKTVEELLETGLIQVATKEEELNAIRTENSSLTKEVQDLKAKQNDQVSFASLVEELKKVIHEKDGKIKSVEELLEAELLKVANKEKTVQDLKQEIKALKEEIGNVQLEKAQQLSITSKVQELQNLLKGKEEQMNTMKAVLEEKEKDLANTGKWLQDLQEENESLKAHVQEVAQHNLKEASSASQFEELEIVLKEKENELKRLEAMLKERESDLSSKTQLLQDVQDENKLFKSQIEQLKQQNYQQASSFPPHEELLKVISEREKEISGLWNELDSLKDAVEHQRKKNNDLREKNWEAMEALASTEKMLQDKVNKTSKERQQQVEAVELEAKEVLKKLFPKVSVPSNLSYGEWLHGFEKKAKECMAGTSGSEEVKVLEHKLKEADEMHTLLQLECEKYKSVLAETEGILQKLQRSVEQEENKWKVKVDESHKTIKQMQSSFTSSEQELERLRSENKDIENLRREREHLEMELEKAEMERSTYVTEVRELKDLLTELQKKLDDSYSEAVRQNEELNLLKAQLNETLTKLRTEQNERQKVAGDLHKAQQSLELIQSKIVKAAGDTTVIENSDVSPETESSEKETMSVSLNQTVTQLQQLLQAVNQQLTKEKEHYQVLEXSNWETVHLRIKKALYYILPN

SEQ ID NO: 1055 - protein, 1321 aa, Homo Sapiens
  misc_feature (1301)..(1301): Xaa can be any naturally occurring amino acid
MEFYESAYFIVLIPSIVITVIFLFFWLFMKETLYDEVLAKQKREQKLIPTKTDKKKAEKKKNKKKEIQNGNLHESDSESVPRDFKLSDALAVEDDQVAPVPLNVVETSSSVRERKKKEKKQKPVLEEQVIKESDASKIPGKKVEPVPVTKQPTPPSEAAASKKKPGQKKSKNGSDDQDKKVETLMVPSKRQEALPLHQETKQESGSGKKKASSKKQKTENVFVDEPLIHATTYIPLMDNADSSPVVDKREVIDLLKPDQVEGIQKSGTKKLKTETDKENAEVKFKDFLLSLKTMMFSEDEALCVVDLLKEKSGVIQDALKKSSKGELTTLIHQLQEKDKLLAAVKEDAAATKDRCKQLTQEMMTEKERSNVVITRMKDRIGTLEKEHNVFQNKIHVSYQETQQMQMKFQQVREQMEAEIAHLKQENGILRDAVSNTTNQLESKQSAELNKLRQDYARLVNELTEKTGKLQQEEVQKKNAEQAATQLKVQLQEAERRWEEVQSYIRKRTAEHEAAQQDLQSKFVAKENEVQSLHSKLTDTLVSKQQLEQRLMQLMESEQKRVNKEESLQMQVQDILEQNEALKAQIQQFHSQIAAQTSASVLAEELHKVIAEKDKQIKQTEDSLASERDRLTSKEEELKDIQNMNFLLKAEVQKLQALANEQAAAAHELEKMQQSVYVKDDKIRLLEEQLQHEISNKMEEFKILNDQNKALKSEVQKLQTLVSEQPNKDVVEQMEKCIQEKDEKLKTVEELLETGLIQVATKEEELNAIRTENSSLTKEVQDLKAKQNDQVSFASLVEELKKVIHEKDGKIKSVEELLEAELLKVANKEKTVQDLKQEIKALKEEIGNVQLEKAQQLSITSKVQELQNLLKGKEEQMNTMKAVLEEKEKDLANTGKWLQDLQEENESLKAHVQEVAQHNLKEASSASQFEELEIVLKEKENELKRLEAMLKERESDLSSKTQLLQDVQDENKLFKSQIEQLKQQNYQQASSFPPHEELLKVISEREKEISGLWNELDSLKDAVEHQRKKNNERQQQVEAVELEAKEVLKKLFPKVSVPSNLSYGEWLHGFEKKAKECMAGTSGSEEVKVLEHKLKEADEMHTLLQLECEKYKSVLAETEGILQKLQRSVEQEENKWKVKVDESHKTIKQMQSSFTSSEQELERLRSENKDIENLRREREHLEMELEKAEMERSTYVTEVRELKAQLNETLTKLRTEQNERQKVAGDLHKAQQSLELIQSKIVKAAGDTTVIENSDVSPETESSEKETMSVSLNQTVTQLQQLLQAVNQQLTKEKEHYQVLEXSNWETVHLRIKKALYYILPN

SEQ ID NO: 1056 - protein, 1364 aa, Homo Sapiens
  misc_feature (1358)..(1358): Xaa can be any naturally occurring amino acid
MEFYESAYFIVLIPSIVITVIFLFFWLFMKETLYDEVLAKQKREQKLIPTKTDKKKAEKKKNKKKEIQNGNLHESDSESVPRDFKLSDALAVEDDQVAPVPLNVVETSSSVRERKKKEKKQKPVLEEQVIKESDASKIPGKKVEPVPVTKQPTPPSEAAASKKKPGQKKSKNGSDDQDKKVETLMVPSKRQEALPLHQETKQESGSGKKKASSKKQKTENVFVDEPLIHATTYIPLMDNADSSPVVDKREVIDLLKPDQVEGIQKSGTKKLKTETDKENAEVKFKDFLLSLKTMMFSEDEALCVVDLLKEKSGVIQDALKKSSKGELTTLIHQLQEKDKLLAAVKEDAAATKDRCKQLTQEMMTEKERSNVVITRMKDRIGTLEKEHNVFQNKIHVSYQETQQMQMKFQQVREQMEAEIAHLKQENGILRDAVSNTTNQLESKQSAELNKLRQDYARLVNELTEKTGKLQQEEVQKKNAEQAATQLKVQLQEAERRWEEVQSYIRKRTAEHEAAQQDLQSKFVAKENEVQSLHSKLTDTLVSKQQLEQRLMQLMESEQKRVNKEESLQMQVQDILEQNEALKAQIQQFHSQIAAQTSASVLAEELHKVIAEKDKQIKQTEDSLASERDRLTSKEEELKDIQNMNFLLKAEVQKLQALANEQAAAAHELEKMQQSVYVKDDKIRLLEEQLQHEISNKMEEFKILNDQNKALKSEVQKLQTLVSEQPNKDVVEQMEKCIQEKDEKLKTVEELLETGLIQVATKEEELNAIRTENSSLTKEVQDLKAKQNDQVSFASLVEELKKVIHEKDGKIKSVEELLEAELLKVANKEKTVQDLKQEIKALKEEIGNVQLEKAQQLSITSKVQELQNLLKGKEEQMNTMKAVLEEKEKDLANTGKWLQDLQEENESLKAHVQEVAQHNLKEASSASQFEELEIVLKEKENELKRLEAMLKERESDLSSKTQLLQDVQDENKLFKSQIEQLKQQNYQQASSFPPHEELLKVISEREKEISGLWNELDSLKDAVEHQRKKNNDLREKNWEAMEALASTEKMLQDKVNKTSKERQQQVEAVELEAKEVLKKLFPKVSVPSNLSYGEWLHGFEKKAKECMAGTSGSEEVKVLEHKLKEADEMHTLLQLECEKYKSVLAETEGILQKLQRSVEQEENKWKVKVDESHKTIKQMQSSFTSSEQELERLRSENKDIENLRREREHLEMELEKAEMERSTYVTEVRELKDLLTELQKKLDDSYSEAVRQNEELNLLKAQLNETLTKLRTEQNERQKVAGDLHKAQQSLELIQSKIVKAAGDTTVIENSDVSPETESSEKETMSVSLNQTVTQLQQLLQAVNQQLTKEKEHYQVLEXSSSGLP

SEQ ID NO: 1057 - protein, 486 aa, Homo Sapiens
  misc_feature (482)..(482): Xaa can be any naturally occurring amino acid
MGALARALPSILLALLLTSTPEALGANPGLVARITDKGLQYAAQEGLLALQSELLRITLPDFTGDLRIPHVGRGRYEFHSLNIHSCELLHSALRPVPGQGLSLSISDSSIRVQGRWKVRKSFFKLQGSFDVSVKGISISVNLLLGSESSGRPTVTASSCSSDIADVEVDMSGDLGWLLNLFHNQIESKFQKVLESRICEMIQKSVSSDLQPYLQTLPVTTEIDSFADIDYSLVEAPRATAQMLEVMFKGEIFHRNHRSPVTLLAAVMSLPEEHNKMVYFAISDYVFNTASLVYHEEGYLNFSITDDMIPPDSNIRLTTKSFRPFVPRLARLYPNMNLELQGSVPSAPLLNFSPGNLSVDPYMEIDAFVLLPSSSKEPVFRLSVATNVSATLTFNTSKITGFLKPGKVKVELKESKVGLFNAELLEALLNYYILNTFYPKFNDKLAEGFPLPLLKRVQLYDLGLQIHKDFLFLGANVQYMRVXGQER

SEQ ID NO: 1058 - protein, 650 aa, Homo Sapiens
  misc_feature (628)..(628): Xaa can be any naturally occurring amino acid
MARGSVSDEEMMELREAFAKVDTDGNGYISFNELNDLFKAACLPLPGYRVREITENLMATGDLDQDGRISFDEFIKIFHGLKSTDVAKTFRKAINKKEGICAIGGTSEQSSVGTQHSYSEEEKYAFVNWINKALENDPDCRHVIPMNPNTNDLFNAVGDGIVLCKMINLSVPDTIDERTINKKKLTPFTIQENLNLALNSASAIGCHVVNIGAEDLKEGKPYLVLGLLWQVIKIGLFADIELSRNEALIALLREGESLEDLMKLSPEELLLRWANYHLENAGCNKIGNFSTDIKDSKAYYHLLEQVAPKGDEEGVPAVVIDMSGLREKDDIQRAECMLQQAERLGCRQFVTATDVVRGNPKLNLAFIANLFNRYPALHKPENQDIDWGALEGETREERTFRNWMNSLGVNPRVNHLYSDLSDALVIFQLYEKIKVPVDWNRVNKPPYPKLGGNMKKLENCNYAVELGKNQAKFSLVGIGGQDLNEGNRTLTLALIWQLMRRYTLNILEEIGGGQKVNDDIIVNWVNETLREAEKSSSISSFKDPKISTSLPVLDLIDAIQPGSINYDLLKTENLNDDEKLNNAKYAISMARKIGARVYALPEDLVEVNPKMVMTVFACLMGKGMKRVXGQWGWVGGGALTPDCPAQMLQG

SEQ ID NO: 1059 - protein, 341 aa, Homo Sapiens
  misc_feature (335)..(335): Xaa can be any naturally occurring amino acid
MATLKEKLIAPVAEEEATVPNNKITVVGVGQVGMACAISILGKSLADELALVDVLEDKLKGEMMDLQHGSLFLQTPKIVADKDYSVTANSKIVVVTAGVRQQEGESRLNLVQRNVNVFKFIIPQIVKYSPDCIIIVVSNPVDILTYVTWKLSGLPKHRVIGSGCNLDSARFRYLMAEKLGIHPSSCHGWILGEHGDSSVAVWSGVNVAGVSLQELNPEMGTDNDSENWKEVHKMVVESAYEVIKLKGYTNWAIGLSVADLIESMLKNLSRIHPVSTMVKGMYGIENEVFLSLPCILNARGLTSVINQKLKDDEVAQLKKSADTLWDIQKDLKDLXLVSSRL

SEQ ID NO: 1060 - protein, 942 aa, Homo Sapiens
  misc_feature (912)..(912): Xaa can be any naturally occurring amino acid
MAAAAASAPQQLSDEELFSQLRRYGLSPGPVTESTRPVYLKKLKKLREEEQQQHRSGGRGNKTRNSNNNNTAAATVAAAGPAAAAAAGMGVRPVSGDLSYLRTPGGLCRISASGPESLLGGPGGASAAPAAGSKVLLGFSSDESDVEASPRDQAGGGGRKDRASLQYRGLKAPPAPLAASEVTNSNSAERRKPHSWWGARRPAGPELQTPPGKDGAVEDEEGEGEDGEERDPETEEPLWASRTVNGSRLVPYSCRENYSDSEEEDDDDVASSRQVLKDDSLSRHRPRRTHSKPLPPLTAKSAGGRLETSVQGGGGLAMNDRAAAAGSLDRSRNLEEAAAAEQGGGCDQVDSSPVPRYRVNAKKLTPLLPPPLTDMDSTLDSSTGSLLKTNNHIGGGAFSVDSPRIYSNSLPPSAAVAASSSLRINHANHTGSNHTYLKNTYNKPKLSEPEEELLQQFKREEVSPTGSFSAHYLSMFLLTAACLFFLILGLTYLGMRGTGVSEDGELSIENPFGETFGKIQESEKTLMMNTLYKLHDRLAQLAGDHECGSSSQRTLSVQEAAAYLKDLGPEYEGIFNTSLQWILENGKDVGIRCVGFGPEEELTNITDVQFLQSTRPLMSFWCRFRRAFVTVTHRLLLLCLGVVMVCVVLRYMKYRWTKEEEETRQMYDMVVKIIDVLRSHNEACQENKDLQPYMPIPHVRDSLIQPHDRKKMKKVWDRAVDFLAANESRVRTETRRIGGADFLVWRWIQPSASCDKILVIPSKVWQGQAFHLDRRNSPPNSLTPCLKIRNMFDPVMEIGDQWHLAIQEAILEKCSDNDGIVHIAVDKNSREGCVYVKCLSPEYAGKAFKALHGSWFDGKLVTVKYLRLDRYHHRFPQALTSNTPLKPSNKHMNSMSHLRLRTGLTNSQGSSXKDFLPFLRLLFTIGKFLFGFLSSFLNAFCM

SEQ ID NO: 1061 - protein, 918 aa, Homo Sapiens
  misc_feature (897)..(897): Xaa can be any naturally occurring amino acid
MICQKFCVVLLHWEFIYVITAFNLSYPITPWRFKLSCMPPNSTYDYFLLPAGLSKNTSNSNGHYETAVEPKFNSSGTHFSNLSKTTFHCCFRSEQDRNCSLCADNIEGKTFVSTVNSLVFQQIDANWNIQCWLKGDLKLFICYVESLFKNLFRNYNYKVHLLYVLPEVLEDSPLVPQKGSFQMVHCNCSVHECCECLVPVPTAKLNDTLLMCLKITSGGVIFQSPLMSVQPINMVKPDPPLGLHMEITDDGNLKISWSSPPLVPFPLQYQVKYSENSTTVIREADKIVSATSLLVDSILPGSSYEVQVRGKRLDGPGIWSDWSTPRVFTTQDVIYFPPKILTSVGSNVSFHCIYKKENKIVPSKEIVWWMNLAEKIPQSQYDVVSDHVSKVTFFNLNETKPRGKFTYDAVYCCNEHECHHRYAELYVIDVNINISCETDGYLTKMTCRWSTSTIQSLAESTLQLRYHRSSLYCSDIPSIHPISEPKDCYLQSDGFYECIFQPIFLLSGYTMWIRINHSLGSLDSPPTCVLPDSVVKPLPPSSVKAEITINIGLLKISWEKPVFPENNLQFQIRYGLSGKEVQWKMYEVYDAKSKSVSLPVPDLCAVYAVQVRCKRLDGLGYWSNWSNPAYTVVMDIKVPMRGPEFWRIINGDTMKKEKNVTLLWKPLMKNDSLCSVQRYVINHHTSCNGTWSEDVGNHTKFTFLWTEQAHTVTVLAINSIGASVANFNLTFSWPMSKVNIVQSLSAYPLNSSCVIVSWILSPSDYKLMYFIIEWKNLNEDGEIKWLRISSSVKKYYIHDHFIPIEKYQFSLYPIFMEGVGKPKIINSFTQDDIEKHQSDAGLYVIVPVIISSSILLLGTLLISHQRMKKLFWEDVPNPKNCSWAQGLNFQKRTDILXSLIMITTDEPNVPTSQQSIEY

SEQ ID NO: 1062 - protein, 1152 aa, Homo Sapiens
  misc_feature (1098)..(1098): Xaa can be any naturally occurring amino acid
MMDIYVCLKRPSWMVDNKRMRTASNFQWLLSTFILLYLMNQVNSQKKGAPHDLKCVTNNLQVWNCSWKAPSGTGRGTDYEVCIENRSRSCYQLEKTSIKIPALSHGDYEITINSLHDFGSSTSKFTLNEQNVSLIPDTPEILNLSADFSTSTLYLKWNDRGSVFPHRSNVIWEIKVLRKESMELVKLVTHNTTLNGKDTLHHWSWASDMPLECAIHFVEIRCYIDNLHFSGLEEWSDWSPVKNISWIPDSQTKVFPQDKVILVGSDITFCCVSQEKVLSALIGHTNCPLIHLDGENVAIKIRNISVSASSGTNVVFTTEDNIFGTVIFAGYPPDTPQQLNCETHDLKEIICSWNPGRVTALVGPRATSYTLVESFSGKYVRLKRAEAPTNESYQLLFQMLPNQEIYNFTLNAHNPLGRSQSTILVNITEKVYPHTPTSFKVKDINSTAVKLSWHLPGNFAKINFLCEIEIKKSNSVQEQRNVTIKGVENSSYLVALDKLNPYTLYTFRIRCSTETFWKWSKWSNKKQHLTTEASPSKGPDTWREWSSDGKNLIIYWKPLPINEANGKILSYNVSCSSDEETQSLSEIPDPQHKAEIRLDKNDYIISVVAKNSVGSSPPSKIASMEIPNDDLKIEQVVGMGKGILLTWHYDPNMTCDYVIKWCNSSRSEPCLMDWRKVPSNSTETVIESDEFRPGIRYNFFLYGCRNQGYQLLRSMIGYIEELAPIVAPNFTVEDTSADSILVKWEDIPVEELRGFLRGYLFYFGKGERDTSKMRVLESGRSDIKVKNITDISQKTLRIADLQGKTSYHLVLRAYTDGGVGPEKSMYVVTKENSVGLIIAILIPVAVAVIVGVVTSILCYRKREWIKETFYPDIPNPENCKALQFQKSVCEGSSALKTLEMNPCTPNNVEVLETRSAFPKIEDTEIISPVAERPEDRSDAEPENHVVVSYCPPIIEEEIPNPAADEAGGTAQVIYIDVQSMYQPQAKPEEEQENDPVGGAGYKPQMHLPINSTVEDIAAEEDLDKTAGYRPQANVNTWNLVSPDSPRSIDSNSEIVSFGSPCSINSRQFLIPPKDEDSPKSNGGGWSFTNFFQNKPNDXQCHRVTSVSHLNKLLLLVLLHQHWAFLEGSCEVLLGGELHYMLSYTESVHVLLM

SEQ ID NO: 1063 - protein, 509 aa, Homo Sapiens
  misc_feature (500)..(500): Xaa can be any naturally occurring amino acid
MDTSPLCFSILLVLCIFIQSSALGQSLKPEPFGRRAQAVETNKTLHEMKTRFLLFGETNQGCQIRINHPDTLQECGFNSSLPLVMIIHGWSVDGVLENWIWQMVAALKSQPAQPVNVGLVDWITLAHDHYTIAVRNTRLVGKEVAALLRWLEESVQLSRSHVHLIGYSLGAHVSGFAGSSIGGTHKIGRITGLDAAGPLFEGSAPSNRLSPDDANFVDAIHTFTREHMGLSVGIKQPIGHYDFYPNGGSFQPGCHFLELYRHIAQHGFNAITQTIKCSHERSVHLFIDSLLHAGTQSMAYPCGDMNSFSQGLCLSCKKGRCNTLGYHVRQEPRSKSKRLFLVTRAQSPFKVYHYQLKIQFINQTETPIQTTFTMSLLGTKEKMQKIPITLGKGIASNKTYSFLITLDVDIGELIMIKFKWENSAVWANVWDTVQTIIPWSTGPRHSGLVLKTIRVKAGETQQRMTFCSENTDDLLLRPTQEKIFVKCEIKSKTSKRKIRXDLMKTQCKE

SEQ ID NO: 1064 - protein, 528 aa, Homo Sapiens
  misc_feature (511)..(511): Xaa can be any naturally occurring amino acid
MAGSRQRGLRARVRPLFCALLLSLGRFVRGDGVGGDPAVALPHRRFEYKYSFKGPHLVQSDGTVPFWAHAGNAIPSSDQIRVAPSLKSQRGSVWTKTKAAFENWEVEVTFRVTGRGRIGADGLAIWYAENQGLEGPVFGSADLWNGVGIFFDSFDNDGKKNNPAIVIIGNNGQIHYDHQNDGASQALASCQRDFRNKPYPVRAKITYYQNTLTVMINNGFTPDKNDYEFCAKVENMIIPAQGHFGISAATGGLADDHDVLSFLTFQLTEPGKEPPTPDKEISEKEKEKYQEEFEHFQQELDKKKEEFQKGHPDLQGQPAEEIFESVGDRELRQVFEGQNRIHLEIKQLNRQLDMILDEQRRYVSSLTEEISKRGAGMPGQHGQITQQELDTVVKTQHEILRQVNEMKNSMSETVRLVSGMQHPGSAGGVYETTQHFIDIKEHLHIVKRDIDNLVQRNMPSNEKPKCPELPPFPSCLSTVHFIIFVVVQTVLFIGYIMYRSQQEAAAKKFFXLPFSCVLHLFVYKMMSF

SEQ ID NO: 1065 - protein, 595 aa, Homo Sapiens
  misc_feature (587)..(587): Xaa can be any naturally occurring amino acid
MATATPVPPRMGSRAGGPTTPLSPTRLSRLQEKEELRELNDRLAVYIDKVRSLETENSALQLQVTEREEVRGRELTGLKALYETELADARRALDDTARERAKLQIELGKCKAEHDQLLLNYAKKESDLNGAQIKLREYEAALNSKDAALATALGDKKSLEGDLEDLKDQIAQLEASLAAAKKQLADETLLKVDLENRCQSLTEDLEFRKSMYEEEINETRRKHETRLVEVDSGRQIEYEYKLAQALHEMREQHDAQVRLYKEELEQTYHAKLENARLSSEMNTSTVNSAREELMESRMRIESLSSQLSNLQKESRACLERIQELEDLLAKEKDNSRRMLTDKEREMAEIRDQMQQQLNDYEQLLDVKLALDMEISAYRKLLEGEEERLKLSPSPSSRVTVSRASSSRSVRTTRGKRKRVDVEESEASSSVSISHSASATGNVCIEEIDVDGKFIRLKNTSEQDQPMGGWEMIRKIGDTSVSYKYTSRYVLKAGQTVTIWAANAGVTASPPTDLIWKNQNSWGTGEDVKVILKNSQGEEVAQRSTVFKTTIPEEEEEEEEAAGVVVEEELFHQQGTPRASNRSCAIMXNFQLSSSK

SEQ ID NO: 1066 - protein, 628 aa, Homo Sapiens
  misc_feature (601)..(601): Xaa can be any naturally occurring amino acid
MATPLPGRAGGPATPLSPTRLSRLQEKEELRELNDRLAHYIDRVRALELENDRLLLKISEKEEVTTREVSGIKALYESELADARRVLDETARERARLQIEIGKLRAELDEVNKSAKKREGELTVAQGRVKDLESLFHRSEVELAAALSDKRGLESDVAELRAQLAKAEDGHAVAKKQLEKETLMRVDLENRCQSLQEELDFRKSVFEEEVRETRRRHERRLVEVDSSRQQEYDFKMAQALEELRSQHDEQVRLYKLELEQTYQAKLDSAKLSSDQNDKAASAAREELKEARMRLESLSYQLSGLQKQASAAEDRIRELEEAMAGERDKFRKMLDAKEQEMTEMRDVMQQQLAEYQELLDVKLALDMEINAYRKLLEGEEERLKLSPSPSSRVTVSRATSSSSGSLSATGRLGRSKRKRLEVEEPLGSGPSVLGTGTGGSGGFHLAQQASASGSVSIEEIDLEGKFVQLKNNSDKDQSLGNWRIKRQVLEGEEIAYKFTPKYILRAGQMVTVWAAGAGVAHSPPSTLVWKGQSSWGTGESFRTVLVNADGEEVAMRTVKKSSVMRENENGEEEEEEAEFGEEDLFHQQGDPRTTSRGCYVMXTHTPHPHTFLYPEPLKTIFISLAFFSS

SEQ ID NO: 1067 - protein, 197 aa, Homo Sapiens
  misc_feature (154)..(154): Xaa can be any naturally occurring amino acid
MGAPLLSPGWGAGAAGRRWWMLLAPLLPALLLVRPAGALVEGLYCGTRDCYEVLGVSRSAGKAEIARAYRQLARRYHPDRYRPQPGDEGPGRTPQSAEEAFLLVATAYETLKVSQAAAELQQYCMQNACKDALLVGVPAGSNPFREPRSCALLXRLERSLLRNAFKHKVMNDCLQVSRKHFSLTFRDISALSCGLVL

SEQ ID NO: 1068 - protein, 368 aa, Homo Sapiens
  misc_feature (348)..(348): Xaa can be any naturally occurring amino acid
MSSWSRQRPKSPGGIQPHVSRTLFLLLLLAASAWGVTLSPKDCQVFRSDHGSSISCQPPAEIPGYLPADTVHLAVEFFNLTHLPANLLQGASKLQELHLSSNGLESLSPEFLRPVPQLRVLDLTRNALTGLPPGLFQASATLDTLVLKENQLEVLEVSWLHGLKALGHLDLSGNRLRKLPPGLLANFTLLRTLDLGENQLETLPPDLLRGPLQLERLHLEGNKLQVLGKDLLLPQPDLRYLFLNGNKLARVAAGAFQGLRQLDMLDLSNNSLASVPEGLWASLGQPNWDMRDGFDISGNPWICDQNLSDLYRWLQAQKDKMFSQNDTRCAGPEAVKGQTLLAVAKSQXDQGLGLRVGGLVEHCNPLNK

SEQ ID NO: 1069 - protein, 1127 aa, Homo Sapiens
  misc_feature (1094)..(1094): Xaa can be any naturally occurring amino acid
MARPVRGGLGAPRRSPCLLLLWLLLLRLEPVTAAAGPRAPCAAACTCAGDSLDCGGRGLAALPGDLPSWTRSLNLSYNKLSEIDPAGFEDLPNLQEVYLNNNELTAVPSLGAASSHVVSLFLQHNKIRSVEGSQLKAYLSLEVLDLSLNNITEVRNTCFPHGPPIKELNLAGNRIGTLELGAFDGLSRSLLTLRLSKNRITQLPVRAFKLPRLTQLDLNRNRIRLIEGLTFQGLNSLEVLKLQRNNISKLTDGAFWGLSKMHVLHLEYNSLVEVNSGSLYGLTALHQLHLSNNSIARIHRKGWSFCQKLHELVLSFNNLTRLDEESLAELSSLSVLRLSHNSISHIAEGAFKGLRSLRVLDLDHNEISGTIEDTSGAFSGLDSLSKLTLFGNKIKSVAKRAFSGLEGLEHLNLGGNAIRSVQFDAFVKMKNLKELHISSDSFLCDCQLKWLPPWLIGRMLQAFVTATCAHPESLKGQSIFSVPPESFVCDDFLKPQIITQPETTMAMVGKDIRFTCSAASSSSSPMTFAWKKDNEVLTNADMENFVHVHAQDGEVMEYTTILHLRQVTFGHEGRYQCVITNHFGSTYSHKARLTVNVLPSFTKTPHDITIRTTTMARLECAATGHPNPQIAWQKDGGTDFPAARERRMHVMPDDDVFFITDVKIDDAGVYSCTAQNSAGSISANATLTVLETPSLVVPLEDRVVSVGETVALQCKATGNPPPRITWFKGDRPLSLTERHHLTPDNQLLVVQNVVAEDAGRYTCEMSNTLGTERAHSQLSVLPAAGCRKDGTTVGIFTIAVVSSIVLTSLVWVCIIYQTRKKSEEYSVTNTDETVVPPDVPSYLSSQGTLSDRQETVVRTEGGPQANGHIESNGVCPRDASHFPEPDTHSVACRQPKLCAGSAYHKEPWKAMEKAEGTPGPHKMEHGGRVVCSDCNTEVDCYSRGQAFHPQPVSRDSAQPSAPNGPEPGGSDQEHSPHHQCSRTAAGSCPECQGSLYPSNHDRMLTAVKKKPMASLDGKGDSSWTLARLYHPDSTELQPASSLTSGSPERAEAQYLLVSNGHLPKACDASPESTPLTGQLPGKQRVPLLLAPKSXVLSTSVLVIPISTGKRGRRGCEEAWVQASLICT

SEQ ID NO: 1070 - protein, 4676 aa, Homo Sapiens
  misc_feature (4545)..(4545): Xaa can be any naturally occurring amino acid
MLTPPLLLLLPLLSALVAAAIDAPKTCSPKQFACRDQITCISKGWRCDGERDCPDGSDEAPEICPQSKAQRCQPNEHNCLGTELCVPMSRLCNGVQDCMDGSDEGPHCRELQGNCSRLGCQHHCVPTLDGPTCYCNSSFQLQADGKTCKDFDECSVYGTCSQLCTNTDGSFICGCVEGYLLQPDNRSCKAKNEPVDRPPVLLIANSQNILATYLSGAQVSTITPTSTRQTTAMDFSYANETVCWVHVGDSAAQTQLKCARMPGLKGFVDEHTINISLSLHHVEQMAIDWLTGNFYFVDDIDDRIFVCNRNGDTCVTLLDLELYNPKGIALDPAMGKVFFTDYGQIPKVERCDMDGQNRTKLVDSKIVFPHGITLDLVSRLVYWADAYLDYIEVVDYEGKGRQTIIQGILIEHLYGLTVFENYLYATNSDNANAQQKTSVIRVNRFNSTEYQVVTRVDKGGALHIYHQRRQPRVRSHACENDQYGKPGGCSDICLLANSHKARTCRCRSGFSLGSDGKSCKKPEHELFLVYGKGRPGIIRGMDMGAKVPDEHMIPIENLMNPRALDFHAETGFIYFADTTSYLIGRQKIDGTERETILKDGIHNVEGVAVDWMGDNLYWTDDGPKKTISVARLEKAAQTRKTLIEGKMTHPRAIVVDPLNGWMYWTDWEEDPKDSRRGRLERAWMDGSHRDIFVTSKTVLWPNGLSLDIPAGRLYWVDAFYDRIETILLNGTDRKIVYEGPELNHAFGLCHHGNYLFWTEYRSGSVYRLERGVGGAPPTVTLLRSERPPIFEIRMYDAQQQQVGTNKCRVNNGGCSSLCLATPGSRQCACAEDQVLDADGVTCLANPSYVPPPQCQPGEFACANSRCIQERWKCDGDNDCLDNSDEAPALCHQHTCPSDRFKCENNRCIPNRWLCDGDNDCGNSEDESNATCSARTCPPNQFSCASGRCIPISWTCDLDDDCGDRSDESASCAYPTCFPLTQFTCNNGRCININWRCDNDNDCGDNSDEAGCSHSCSSTQFKCNSGRCIPEHWTCDGDNDCGDYSDETHANCTNQATRPPGGCHTDEFQCRLDGLCIPLRWRCDGDTDCMDSSDEKSCEGVTHVCDPSVKFGCKDSARCISKAWVCDGDNDCEDNSDEENCESLACRPPSHPCANNTSVCLPPDKLCDGNDDCGDGSDEGELCDQCSLNNGGCSHNCSVAPGEGIVCSCPLGMELGPDNHTCQIQSYCAKHLKCSQKCDQNKFSVKCSCYEGWVLEPDGESCRSLDPFKPFIIFSNRHEIRRIDLHKGDYSVLVPGLRNTIALDFHLSQSALYWTDVVEDKIYRGKLLDNGALTSFEVVIQYGLATPEGLAVDWIAGNIYWVESNLDQIEVAKLDGTLRTTLLAGDIEHPRAIALDPRDGILFWTDWDASLPRIEAASMSGAGRRTVHRETGSGGWPNGLTVDYLEKRILWIDARSDAIYSARYDGSGHMEVLRGHEFLSHPFAVTLYGGEVYWTDWRTNTLAKANKWTGHNVTVVQRTNTQPFDLQVYHPSRQPMAPNPCEANGGQGPCSHLCLINYNRTVSCACPHLMKLHKDNTTCYEFKKFLLYARQMEIRGVDLDAPYYNYIISFTVPDIDNVTVLDYDAREQRVYWSDVRTQAIKRAFINGTGVETVVSADLPNAHGLAVDWVSRNLFWTSYDTNKKQINVARLDGSFKNAVVQGLEQPHGLVVHPLRGKLYWTDGDNISMANMDGSNRTLLFSGQKGPVGLAIDFPESKLYWISSGNHTINRCNLDGSGLEVIDAMRSQLGKATALAIMGDKLWWADQVSEKMGTCSKADGSGSVVLRNSTTLVMHMKVYDESIQLDHKGTNPCSVNNGDCSQLCLPTSETTRSCMCTAGYSLRSGQQACEGVGSFLLYSVHEGIRGIPLDPNDKSDALVPVSGTSLAVGIDFHAENDTIYWVDMGLSTISRAKRDQTWREDVVTNGIGRVEGIAVDWIAGNIYWTDQGFDVIEVARLNGSFRYVVISQGLDKPRAITVHPEKGYLFWTEWGQYPRIERSRLDGTERVVLVNVSISWPNGISVDYQDGKLYWCDARTDKIERIDLETGENREVVLSSNNMDMFSVSVFEDFIYWSDRTHANGSIKRGSKDNATDSVPLRTGIGVQLKDIKVFNRDRQKGTNVCAVANGGCQQLCLYRGRGQRACACAHGMLAEDGASCREYAGYLLYSERTILKSIHLSDERNLNAPVQPFEDPEHMKNVIALAFDYRAGTSPGTPNRIFFSDIHFGNIQQINDDGSRRITIVENVGSVEGLAYHRGWDTLYWTSYTTSTITRHTVDQTRPGAFERETVITMSGDDHPRAFVLDECQNLMFWTNWNEQHPSIMRAALSGANVLTLIEKDIRTPNGLAIDHRAEKLYFSDATLDKIERCEYDGSHRYVILKSEPVHPFGLAVYGEHIFWTDWVRRAVQRANKHVGSNMKLLRVDIPQQPMGIIAVANDTNSCELSPCRINNGGCQDLCLLTHQGHVNCSCRGGRILQDDLTCRAVNSSCRAQDEFECANGECINFSLTCDGVPHCKDKSDEKPSYCNSRRCKKTFRQCSNGRCVSNMLWCNGADDCGDGSDEIPCNKTACGVGEFRCRDGTCIGNSSRCNQFVDCEDASDEMNCSATDCSSYFRLGVKGVLFQPCERTSLCYAPSWVCDGANDCGDYSDERDCPGVKRPRCPLNYFACPSGRCIPMSWTCDKEDDCEHGEDETHCNKFCSEAQFECQNHRCISKQWLCDGSDDCGDGSDEAAHCEGKTCGPSSFSCPGTHVCVPERWLCDGDKDCADGADESIAAGCLYNSTCDDREFMCQNRQCIPKHFVCDHDRDCADGSDESPECEYPTCGPSEFRCANGRCLSSRQWECDGENDCHDQSDEAPKNPHCTSQEHKCNASSQFLCSSGRCVAEALLCNGQDDCGDSSDERGCHINECLSRKLSGCSQDCEDLKIGFKCRCRPGFRLKDDGRTCADVDECSTTFPCSQRCINTHGSYKCLCVEGYAPRGGDPHSCKAVTDEEPFLIFANRYYLRKLNLDGSNYTLLKQGLNNAVALDFDYREQMIYWTDVTTQGSMIRRMHLNGSNVQVLHRTGLSNPDGLAVDWVGGNLYWCDKGRDTIEVSKLNGAYRTVLVSSGLREPRALVVDVQNGYLYWTDWGDHSLIGRIGMDGSSRSVIVDTKITWPNGLTLDYVTERIYWADAREDYIEFASLDGSNRHVVLSQDIPHIFALTLFEDYVYWTDWETKSINRAHKTTGTNKTLLISTLHRPMDLHVFHALRQPDVPNHPCKVNNGGCSNLCLLSPGGGHKCACPTNFYLGSDGRTCVSNCTASQFVCKNDKCIPFWWKCDTEDDCGDHSDEPPDCPEFKCRPGQFQCSTGICTNPAFICDGDNDCQDNSDEANCDIHVCLPSQFKCTNTNRCIPGIFRCNGQDNCGDGEDERDCPEVTCAPNQFQCSITKRCIPRVWVCDRDNDCVDGSDEPANCTQMTCGVDEFRCKDSGRCIPARWKCDGEDDCGDGSDEPKEECDERTCEPYQFRCKNNRCVPGRWQCDYDNDCGDNSDEESCTPRPCSESEFSCANGRCIAGRWKCDGDHDCADGSDEKDCTPRCDMDQFQCKSGHCIPLRWRCDADADCMDGSDEEACGTGVRTCPLDEFQCNNTLCKPLAWKCDGEDDCGDNSDENPEECARFVCPPNRPFRCKNDRVCLWIGRQCDGTDNCGDGTDEEDCEPPTAHTTHCKDKKEFLCRNQRCLSSSLRCNMFDDCGDGSDEEDCSIDPKLTSCATNASICGDEARCVRTEKAAYCACRSGFHTVPGQPGCQDINECLRFGTCSQLCNNTKGGHLCSCARNFMKTHNTCKAEGSEYQVLYIADDNEIRSLFPGHPHSAYEQAFQGDESVRIDAMDVHVKAGRVYWTNWHTGTISYRSLPPAAPPTTSNRHRRQIDRGVTHLNISGLKMPRGIAIDWVAGNVYWTDSGRDVIEVAQMKGENRKTLISGMIDEPHAIVVDPLRGTMYWSDWGNHPKIETAAMDGTLRETLVQDNIQWPTGLAVDYHNERLYWADAKLSVIGSIRLNGTDPIVAADSKRGLSHPFSIDVFEDYIYGVTYINNRVFKIHKFGHSPLVNLTGGLSHASDVVLYHQHKQPEVTNPCDRKKCEWLCLLSPSGPVCTCPNGKRLDNGTCVPVPSPTPPPDAPRPGTCNLQCFNGGSCFLNARRQPKCRCQPRYTGDKCELDQCWEHCRNGGTCAASPSGMPTCRCPTGFTGPKCTQQVCAGYCANNSTCTVNQGNQPQCRCLPGFLGDRCQYRQCSGYCENFGTCQMAADGSRQCRCTAYFEGSRCEVNKCSRCLEGACVVNKQSGDVTCNCTDGRVAPSCLTCVGHCSNGGSCTMNSKMMPECQCPPHMTGPRCEEHVFSQQQPGHIASILIPLLLLLLLVLVAGVVFWYKRRVQGAKGFQHQRMTNGAMNVEIGNPTYKMYEGGEPDDVGGLLDADFALDPDKPTNFTNPVYATLYMGGHGSRHSLASTDEKRELLGRGPEDEIGDPLAXGPAPSDCPQKASCPLPVKSFSEPLPSQPFPGPAGCINVKMKELHFICERASRQASTVLFLHPLPACSLAPPCCLQGDRQGGLGAAPPTLPPERTPLGELVVQPSPPCIRHFAKALPSRPIPACPLPQLPEG

SEQ ID NO: 1071 - protein, 4663 aa, Homo Sapiens
  misc_feature (4656)..(4656): Xaa can be any naturally occurring amino acid
MDRGPAAVACTLLLALVACLAPASGQECDSAHFRCGSGHCIPADWRCDGTKDCSDDADEIGCAVVTCQQGYFKCQSEGQCIPNSWVCDQDQDCDDGSDERQDCSQSTCSSHQITCSNGQCIPSEYRCDHVRDCPDGADENDCQYPTCEQLTCDNGACYNTSQKCDWKVDCRDSSDEINCTEICLHNEFSCGNGECIPRAYVCDHDNDCQDGSDEHACNYPTCGGYQFTCPSGRCIYQNWVCDGEDDCKDNGDEDGCESGPHDVHKCSPREWSCPESGRCISIYKVCDGILDCPGREDENNTSTGKYCSMTLCSALNCQYQCHETPYGGACFCPPGYIINHNDSRTCVEFDDCQIWGICDQKCESRPGRHLCHCEEGYILERGQYCKANDSFGEASIIFSNGRDLLIGDIHGRSFRILVESQNRGVAVGVAFHYHLQRVFWTDTVQNKVFSVDINGLNIQEVLNVSVETPENLAVDWVNNKIYLVETKVNRIDMVNLDGSYRVTLITENLGHPRGIAVDPTVGYLFFSDWESLSGEPKLERAFMDGSNRKDLVKTKLGWPAGVTLDMISKRVYWVDSRFDYIETVTYDGIQRKTVVHGGSLIPHPFGVSLFEGQVFFTDWTKMAVLKANKFTETNPQVYYQASLRPYGVTVYHSLRQPYATNPCKDNNGGCEQVCVLSHRTDNDGLGFRCKCTFGFQLDTDERHCIAVQNFLIFSSQVAIRGIPFTLSTQEDVMVPVSGNPSFFVGIDFDAQDSTIFFSDMSKHMIFKQKIDGTGREILAANRVENVESLAFDWISKNLYWTDSHYKSISVMRLADKTRRTVVQYLNNPRSVVVHPFAGYLFFTDWFRPAKIMRAWSDGSHLLPVINTTLGWPNGLAIDWAASRLYWVDAYFDKIEHSTFDGLDRRRLGHIEQMTHPFGLAIFGEHLFFTDWRLGAIIRVRKADGGEMTVIRSGIAYILHLKSYDVNIQTGSNACNQPTHPNGDCSHFCFPVPNFQRVCGCPYGMRLASNHLTCEGDPTNEPPTEQCGLFSFPCKNGRCVPNYYLCDGVDDCHDNSDEQLCGTLNNTCSSSAFTCGHGECIPAHWRCDKRNDCVDGSDEHNCPTHAPASCLDTQYTCDNHQCISKNWVCDTDNDCGDGSDEKNCNSTETCQPSQFNCPNHRCIDLSFVCDGDKDCVDGSDEVGCVLNCTASQFKCASGDKCIGVTNRCDGVFDCSDNSDEAGCPTRPPGMCHSDEFQCQEDGICIPNFWECDGHPDCLYGSDEHNACVPKTCPSSYFHCDNGNCIHRAWLCDRDNDCGDMSDEKDCPTQPFRCPSWQWQCLGHNICVNLSVVCDGIFDCPNGTDESPLCNGNSCSDFNGGCTHECVQEPFGAKCLCPLGFLLANDSKTCEDIDECDILGSCSQHCYNMRGSFRCSCDTGYMLESDGRTCKVTASESLLLLVASQNKIIADSVTSQVHNIYSLVENGSYIVAVDFDSISGRIFWSDATQGKTWSAFQNGTDRRVVFDSSIILTETIAIDWVGRNLYWTDYALETIEVSKIDGSHRTVLISKNLTNPRGLALDPRMNEHLLFWSDWGHHPRIERASMDGSMRTVIVQDKIFWPCGLTIDYPNRLLYFMDSYLDYMDFCDYNGHHRRQVIASDLIIRHPYALTLFEDSVYWTDRATRRVMRANKWHGGNQSVVMYNIQWPLGIVAVHPSKQPNSVNPCAFSRCSHLCLLSSQGPHFYSCVCPSGWSLSPDLLNCLRDDQPFLITVRQHIIFGISLNPEVKSNDAMVPIAGIQNGLDVEFDDAEQYIYWVENPGEIHRVKTDGTNRTVFASISMVGPSMNLALDWISRNLYSTNPRTQSIEVLTLHGDIRYRKTLIANDGTALGVGFPIGITVDPARGKLYWSDQGTDSGVPAKIASANMDGTSVKTLFTGNLEHLECVTLDIEEQKLYWAVTGRGVIERGNVDGTDRMILVHQLSHPWGIAVHDSFLYYTDEQYEVIERVDKATGANKIVLRDNVPNLRGLQVYHRRNAAESSNGCSNNMNACQQICLPVPGGLFSCACATGFKLNPDNRSCSPYNSFIVVSMLSAIRGFSLELSDHSETMVPVAGQGRNALHVDVDVSSGFIYWCDFSSSVASDNAIRRIKPDGSSLMNIVTHGIGENGVRGIAVDWVAGNLYFTNAFVSETLIEVLRINTTYRRVLLKVTVDMPRHIVVDPKNRYLFWADYGQRPKIERSFLDCTNRTVLVSEGIVTPRGLAVDRSDGYVYWVDDSLDIIARIRINGENSEVIRYGSRYPTPYGITVFENSIIWVDRNLKKIFQASKEPENTEPPTVIRDNINWLRDVTIFDKQVQPRSPAEVNNNPCLENNGGCSHLCFALPGLHTPKCDCAFGTLQSDGKNCAISTENFLIFALSNSLRSLHLDPENHSPPFQTINVERTVMSLDYDSVSDRIYFTQNLASGVGQISYATLSSGIHTPTVIASGIGTADGIAFDWITRRIYYSDYLNQMINSMAEDGSNRTVIARVPKPRAIVLDPCQGYLYWADWDTHAKIERATLGGNFRVPIVNSSLVMPSGLTLDYEEDLLYWVDASLQRIERSTLTGVDREVIVNAAVHAFGLTLYGQYIYWTDLYTQRIYRANKYDGSGQIAMTTNLLSQPRGINTVVKNQKQQCNNPCEQFNGGCSHICAPGPNGAECQCPHEGNWYLANNRKHCIVDNGERCGASSFTCSNGRCISEEWKCDNDNDCGDGSDEMESVCALHTCSPTAFTCANGRCVQYSYRCDYYNDCGDGSDEAGCLFRDCNATTEFMCNNRRCIPREFICNGVDNCHDNNTSDEKNCPDRTCQSGYTKCHNSNICIPRVYLCDGDNDCGDNSDENPTYCTTHTCSSSEFQCASGRCIPQHWYCDQETDCFDASDEPASCGHSERTCLADEFKCDGGRCIPSEWICDGDNDCGDMSDEDKRHQCQNQNCSDSEFLCVNDRPPDRRCIPQSWVCDGDVDCTDGYDENQNCTRRTCSENEFTCGYGLCIPKIFRCDRHNDCGDYSDERGCLYQTCQQNQFTCQNGRCISKTFVCDEDNDCGDGSDELMHLCHTPEPTCPPHEFKCDNGRCIEMMKLCNHLDDCLDNSDEKGCGINECHDPSISGCDHNCTDTLTSFYCSCRPGYKLMSDKRTCVDIDECTEMPFVCSQKCENVIGSYICKCAPGYLREPDGKTCRQNSNIEPYLIFSNRYYLRNLTIDGYFYSLILEGLDNVVALDFDRVEKRLYWIDTQRQVIERMFLNKTNKETIINHRLPAAESLAVDWVSRKLYWLDARLDGLFVSDLNGGHRRMLAQHCVDANNTFCFDNPRGLALHPQYGYLYWADWGHRAYIGRVGMDGTNKSVIISTKLEWPNGITIDYTNDLLYWADAHLGYIEYSDLEGHHRHTVYDGALPHPFAITIFEDTIYWTDWNTRTVEKGNKYDGSNRQTLVNTTHRPFDIHVYHPYRQPIVSNPCGTNNGGCSHLCLIKPGGKGFTCECPDDFRTLQLSGSTYCMPMCSSTQFLCANNEKCIPIWWKCDGQKDCSDGSDELALCPQRFCRLGQFQCSDGNCTSPQTLCNAHQNCPDGSDEDRLLCENHHCDSNEWQCANKRCIPESWQCDTFNDCEDNSDEDSSHCASRTCRPGQFRCANGRCIPQAWKCDVDNDCGDHSDEPIEECMSSAHLCDNFTEFSCKTNYRCIPKWAVCNGVDDCRDNSDEQGCEERTCHPVGDFRCKNHHCIPLRWQCDGQNDCGDNSDEENCAPRECTESEFRCVNQQCIPSRWICDHYNDCGDNSDERDCEMRTCHPEYFQCTSGHCVHSELKCDGSADCLDASDEADCPTRFPDGAYCQATMFECKNHVCIPPYWKCDGDDDCGDGSDEELHLCLDVPCNSPNRFRCDNNRCIYSHEVCNGVDDCGDGTDETEEHCRKPTPKPCTEYEYKCGNGHCIPHDNVCDDADDCGDWSDELGCNKGKERTCAENICEQNCTQLNEGGFICSCTAGFETNVFDRTSCLDINECEQFGTCPQHCRNTKGSYECVCADGFTSMSDRPGKRCAAEGSSPLLLLPDNVRIRKYNLSSERFSEYLQDEEYIQAVDYDWDPKDIGLSVVYYTVRGEGSRFGAIKRAYIPNFESGRNNLVQEVDLKLKYVMQPDGIAVDWVGRHIYWSDVKNKRIEVAKLDGRYRKWLISTDLDQPAAIAVNPKLGLMFWTDWGKEPKIESAWMNGEDRNILVFEDLGWPTGLSIDYLNNDRIYWSDFKEDVIETIKYDGTDRRVIAKEAMNPYSLDIFEDQLYWISKEKGEVWKQNKFGQGKKEKTLVVNPWLTQVRIFHQLRYNKSVPNLCKQICSHLCLLRPGGYSCACPQGSSFIEGSTTECDAAIELPINLPPPCRCMHGGNCYFDETDLPKCKCPSGYTGKYCEMAFSKGISPGTTAVAVLLTILLIVVIGALAIAGFFHYRRTGSLLPALPKLPSLSSLVKPSENGNGVTFRSGADLNMDIGVSGFGPETAIDRSMAMSEDFVMEMGKQPIIFENPMYSARDSAVKVVQPIQVTVSENVDNKNYGSPINPSEIVPETNPTSPAADGTQVTKWNLFKRKSKQTTNFENPIYAQMENEQKESVAATPPPSPSLPAKPKPPSRRDPTPTYSATEDTFKDTANLVKEDSEVXLYQLFRE

SEQ ID NO: 1072 - protein, 1422 aa, Homo Sapiens
  misc_feature (1395)..(1395): Xaa can be any naturally occurring amino acid
MAALLRSARWLLRAGAAPRLPLSLRLLPGGPGRLHAASYLPAARAGPVAGGLLSPARLYAIAAKEKDIQEESTFSSRKISNQFDWALMRLDLSVRRTGRIPKKLLQKVFNDTCRSGGLGGSHALLLLRSCGSLLPELKLEERTEFAHRIWDTLQKLGAVYDVSHYNALLKVYLQNEYKFSPTDFLAKMEEANIQPNRVTYQRLIASYCNVGDIEGASKILGFMKTKDLPVTEAVFSALVTGHARAGDMENAENILTVMRDAGIEPGPDTYLALLNAYAEKGDIDHVKQTLEKVEKSELHLMDRDLLQIIFSFSKAGYPQYVSEILEKVTCERRYIPDAMNLILLLVTEKLEDVALQILLACPVSKEDGPSVFGSFFLQHCVTMNTPVEKLTDYCKKLKEVQMHSFPLQFTLHCALLANKTDLAKALMKAVKEEGFPIRPHYFWPLLVGRRKEKNVQGIIEILKGMQELGVHPDQETYTDYVIPCFDSVNSARAILQENGCLSDSDMFSQAGLRSEAANGNLDFVLSFLKSNTLPISLQSIRSSLLLGFRRSMNINLWSEITELLYKDGRYCQEPRGPTEAVGYFLYNLIDSMSDSEVQAKEEHLRQYFHQLEKMNVKIPENIYRGIRNLLESYHVPELIKDAHLLVESKNLDFQKTVQLTSSELESTLETLKAENQPIRDVLKQLILVLCSEENMQKALELKAKYESDMVTGGYAALINLCCRHDKVEDALNLKEEFDRLDSSAVLDTGKYVGLVRVLAKHGKLQDAINILKEMKEKDVLIKDTTALSFFHMLNGAALRGEIETVKQLHEAIVTLGLAEPSTNISFPLVTVHLEKGDLSTALEVAIDCYEKYKVLPRIHDVLCKLVEKGETDLIQKAMDFVSQEQGEMVMLYDLFFAFLQTGNYKEAKKIIETPGIRARSARLQWFCDRCVANNQVETLEKLVELTQKLFECDRDQMYYNLLKLYKINGDWQRADAVWNKIQEENVIPREKTLRLLAEILREGNQEVPFDVPELWYEDEKHSLNSSSASTTEPDFQKDILIACRLNQKKGAYDIFLNAKEQNIVFNAETYSNLIKLLMSEDYFTQAMEVKAFAETHIKGFTLNDAANSRLIITQVRRDYLKEAVTTLKTVLDQQQTPSRLAVTRVIQALAMKGDVENIEVVQKMLNGLEDSIGLSKMVFINNIALAQIKNNNIDAAIENIENMLTSENKVIEPQYFGLAYLFRKVIEEQLEPAVEKISIMAERLANQFAIYKPVTDFFLQLVDAGKVDDARALLQRCGAIAEQTPILLLFLLRNSRKQGKASTVKSVLELIPELNEKEEAYNSLMKSYVSEKDVTSAKALYEHLTAKNTKLDDLFLKRYASLLKYAGEPVPFIEPPESFEFYAQQLRKLRENSSXNNQAILCFVYICDSVSTCYFEVYLREK

SEQ ID NO: 1073 - protein, 659 aa, Homo Sapiens
  misc_feature (648)..(648): Xaa can be any naturally occurring amino acid
MGPLSARLLMQRGRPKSDRLGKIRSLDLSGLELLSEHLDPKLLCRLTQLQELDLSNNHLETLPDNLGLSHLRVLRCANNQLGDVTALCQFPKLEELSLEGNPFLTVNDNLKVSFLLPTLRKVNGKDASSTYSQVENLNRELTSRVTAHWEKFMATLGPEEEAEKAQADFVKSAVRDVRYGPESLSEFTQWRVRMISEELVAASRTQVQKANSPEKPPEAGAAHKPRARLAALKRPDDVPLSLSPSKRACASPSAQVEGSPVAGSDGSQPAVKLEPLHFLQCHSKNNSPQDLETQLWACAFEPAWEEGATSQTVATCGGEAVCVIDCQTGIVLHKYKAPGEEFFSVAWTALMVVTQAGHKKRWSVLAAAGLRGLVRLLHVRAGFCCGVIRAHKKAIATLCFSPAHETHLFTASYDKRIILWDIGVPNQDYEFQASQLLTLDTTSIPLRLCPVASCPDARLLAGCEGGCCCWDVRLDQPQKRRVCEVEFVFSEGSEASGRRVDGLAFVNEDIVASKGSGLGTICLWSWRQTWGGRGSQSTVAVVVLARLQWSSTELAYFSLSACPDKGIVLCGDEEGNVWLYDVSNILKQPPLLPAALQAPTQILKWPQPWALGQVVTKTMVNTVVANASFTYLTALTDSNIVAIWGRMXPHTIAKDQGHS

SEQ ID NO: 1074 - protein, 1852 aa, Homo Sapiens
  misc_feature (1822)..(1822): Xaa can be any naturally occurring amino acid
MRPRTKARSPGRALRNPWRGFLPLTLALFVGAGHAQRDPVGRYEPAGGDANRLRRPGGSYPAAAAAKVYSLFREQDAPVAGLQPVERAQPGWGSPRRPTEAEARRPSRAQQSRRVQPPAQTRRSTPLGQQQPAPRTRAAPALPRLGTPQRSGAAPPTPPRGRLTGRNVCGGQCCPGWTTANSTNHCIKPVCEPPCQNRGSCSRPQLCVCRSGFRGARCEEVIPDEEFDPQNSRLAPRRWAERSPNLRRSSAAGEGTLARAQPPAPQSPPAPQSPPAGTLSGLSQTHPSQQHVGLSRTVRLHPTATASSQLSSNALPPGPGLEQRDGTQQAVPLEHPSSPWGLNLTEKIKKIKIVFTPTICKQTCARGHCANSCERGDTTTLYSQGGHGHDPKSGFRIYFCQIPCLNGGRCIGRDECWCPANSTGKFCHLPIPQPDREPPGRGSRPRALLEAPLKQSTFTLPLSNQLASVNPSLVKVHIHHPPEASVQIHQVAQVRGGVEEALVENSVETRPPPWLPASPGHSLWDSNNIPARSGEPPRPLPPAAPRPRGLLGRCYLNTVNGQCANPLLELTTQEDCCGSVGAFWGVTLCAPCPPRPASPVIENGQLECPQGYKRLNLTHCQDINECLTLGLCKDAECVNTRGSYLCTCRPGLMLDPSRSRCVSDKAISMLQGLCYRSLGPGTCTLPLAQRITKQICCCSRVGKAWGSECEKCPLPGTEAFREICPAGHGYTYASSDIRLSMRKAEEEELARPPREQGQRSSGALPGPAERQPLRVVTDTWLEAGTIPDKGDSQAGQVTTSVTHAPAWVTGNATTPPMPEQGIAEIQEEQVTPSTDVLVTLSTPGIDRCAAGATNVCGPGTCVNLPDGYRCVCSPGYQLHPSQAYCTDDNECLRDPCKGKGRCINRVGSYSCFCYPGYTLATSGATQECQDINECEQPGVCSGGQCTNTEGSYHCECDQGYIMVRKGHCQDINECRHPGTCPDGRCVNSPGSYTCLACEEGYRGQSGSCVDVNECLTPGVCAHGKCTNLEGSFRCSCEQGYEVTSDEKGCQDVDECASRASCPTGLCLNTEGSFACSACENGYWVNEDGTACEDLDECAFPGVCPSGVCTNTAGSFSCKDCDGGYRPSPLGDSCEDVDECEDPQSSCLGGECKNTVGSYQCLCPQGFQLANGTVCEDVNECMGEEHCAPHGECLNSHGSFFCLCAPGFVSAEGGTSCQDVDECATTDPCVGGHCVNTEGSFNCLCETGFQPSPESGECVDIDECEDYGDPVCGTWKCENSPGSYRCVLGCQPGFHMAPNGDCIDIDECANDTMCGSHGFCDNTDGSFRCLCDQGFEISPSGWDCVDVNECELMLAVCGAALCENVEGSFLCLCASDLEEYDAQEGHCRPRGAGGQSMSEAPTGDHAPAPTRMDCYSGQKGHAPCSSVLGRNTTQAECCCTQGASWGDACDLCPSEDSAEFSEICPSGKGYIPVEGAWTFGQTMYTDADECVIFGPGLCPNGRCLNTVPGYVCLCNPGFHYDASHKKCEDHDECQDLACENGECVNTEGSFHCFCSPPLTLDLSQQRCMNSTSSTEDLPDHDIHMDICWKKVTNDVCSEPLRGHRTTYTECCCQDGEAWSQQCALCPPRSSEVYAQLCNVARIEAEREAGVHFRPGYEYGPGPDDLHYSIYGPDGAPFYNYLGPEDTVPEPAFPNTAGHSADRTPILESPLQPSELQPHYVASHPEPPAGFEGLQAEECGILNGCENGRCVRVREGYTCDCFEGFQLDAAHMACVDVNECDDLNGPAVLCVHGYCENTEGSYRCHCSPGYVAEAGPPHCTAKEXQSGVSVATTWKWPPVTGRGLEDDFLAGKTP

SEQ ID NO: 1075 - protein, 374 aa, Homo Sapiens
  misc_feature (339)..(339): Xaa can be any naturally occurring amino acid
MSLSAFTLFLALIGGTSGQYYDYDFPLSIYGQSSPNCAPECNCPESYPSAMYCDELKLKSVPMVPPGIKYLYLRNNQIDHIDEKAFENVTDLQWLILDHNLLENSKIKGRVFSKLKQLKKLHINHNNLTESVGPLPKSLEDLQLTHNKITKLGSFEGLVNLTFIHLQHNRLKEDAVSAAFKGLKSLEYLDLSFNQIARLPSGLPVSLLTLYLDNNKISNIPDEYFKRFNALQYLRLSHNELADSGIPGNSFNVSSLVELDLSYNKLKNIPTVNENLENYYLEVNQLEKFDIKSFCKILGPLSYSKIKHLRLDGNRISETSLPPDMYECLRVANEVTLNXYLYPGTIFYGYVFLCVSFHSIHILLLFITSMNFKI

SEQ ID NO: 1076 - protein, 664 aa, Homo Sapiens
  misc_feature (627)..(627): Xaa can be any naturally occurring amino acid
MIFLTALPLFWIMISASRGGHWGAWMPSSISAFEGTCVSIPCRFDFPDELRPAVVHGVWYFNSPYPKNYPPVVFKSRTQVVHESFQGRSRLLGDLGLRNCTLLLSNVSPELGGKYYFRGDLGGYNQYTFSEHSVLDIVNTPNIVVPPEVVAGTEVEVSCMVPDNCPELRPELSWLGHEGLGEPAVLGRLREDEGTWVQVSLLHFVPTREANGHRLGCQASFPNTTLQFEGYASMDVKYPPVIVEMNSSVEAIEGSHVSLLCGADSNPPPLLTWMRDGTVLREAVAESLLLELEEVTPAEDGVYACLAENAYGQDNRTVGLSVMYAPWKPTVNGTMVAVEGETVSILCSTQSNPDPILTIFKEKQILSTVIYESELQLELPAVSPEDDGEYWCVAENQYGQRATAFNLSVEFAPVLLLESHCAAARDTVQCLCVVKSNPEPSVAFELPSRNVTVNESEREFVYSERSGLVLTSILTLRGQAQAPPRVICTARNLYGAKSLELPFQGAHRLMWAKIGPVGAVVAFAILIAIVCYITQTRRKKNVTESPSFSAGDNPPVLFSSDFRISGAPEKYESERRLGSERRLLGLRGEPPELDLSYSHSDLGKRPTKDSYTLTEELAEYAEIRVKXRSWGQPAWLTPLRTLAGPHWLWAPFLPKVSGAGAGGE

SEQ ID NO: 1077 - protein, 662 aa, Homo Sapiens
  misc_feature (642)..(642): Xaa can be any naturally occurring amino acid
MTTPALLPLSGRRIPPLNLGPPSFPHHRATLRLSEKFILLLILSAFITLCFGAFFFLPDSSKHKRFDLGLEDVLIPHVDAGKGAKNPGVFLIHGPDEHRHREEEERLRNKIRADHEKALEEAKEKLRKSREEIRAEIQTEKNKVVQEMKIKENKPLPPVPIPNLVGIRGGDPEDNDIREKREKIKEMMKHAWDNYRTYGWGHNELRPIARKGHSPNIFGSSQMGATIVDALDTLYIMGLHDEFLDGQRWIEDNLDFSVNSEVSVFEVNIRFIGGLLAAYYLSGEEIFKIKAVQLAEKLLPAFNTPTGIPWAMVNLKSGVGRNWGWASAGSSILAEFGTLHMEFIHLSYLTGDLTYYKKVMHIRKLLQKMDRPNGLYPNYLNPRTGRWGQYHTSVGGLGDSFYEYLLKAWLMSDKTDHEARKMYDDAIEAIEKHLIKKSRGGLTFIGEWKNGHLEKKMGHLACFAGGMFALGADGSRADKAGHYLELGAEIARTCHESYDRTALKLGPESFKFDGAVEAVAVRQAEKYYILRPEVIETYWYLWRFTHDPRYRQWGWEAALAIEKYCRVNGGFSGVKDVYSSTPTHDDVQQSFFLAETLKYLYLLFSGDDLLPLDHWVFNTEAHPLPVLHLANTTLSGNPAVRXKQFQKDHSHLCFVYMDHYRN

SEQ ID NO: 1078 - protein, 892 aa, Homo Sapiens
  misc_feature (880)..(880): Xaa can be any naturally occurring amino acid
MRLHLLLLLALCGAGTTAAELSYSLRGNWSICNGNGSLELPGAVPGCVHSALFQQGLIQDSYYRFNDLNYRWVSLDNWTYSKEFKIPFEISKWQKVNLILEGVDTVSKILFNEVTIGETDNMFNRYSFDITNVVRDVNSIELRFQSAVLYAAQQSKAHTRYQVPPDCPPLVQKGECHVNFVRKEQCSFSWDWGPSFPTQGIWKDVRIEAYNICHLNYFTFSPIYDKSAQEWNLEIESTFDVVSSKPVGGQVIVAIPKLQTQQTYSIELQPGKRIVELFVNISKNITVETWWPHGHGNQTGYNMTVLFELDGGLNIEKSAKVYFRTVELIEEPIKGSPGLSFYFKINGFPIFLKGSNWIPADSFQDRVTSELLRLLLQSVVDANMNTLRVWGGGIYEQDEFYELCDELGIMVWQDFMFACALYPTDQGFLDSVTAEVAYQIKRLKSHPSIIIWSGNNENEEALMMNWYHISFTDRPIYIKDYVTLYVKNIRELVLAGDKSRPFITSSPTNGAETVAEAWVSQNPNSNYFGDVHFYDYISDCWNWKVFPKARFASEYGYQSWPSFSTLEKVSSTEDWSFNSKFSLHRQHHEGGNKQMLYQAGLHFKLPQSTDPLRTFKDTIYLTQVMQAQCVKTETEFYRRSRSEIVDQQGHTMGALYWQLNDIWQAPSWASLEYGGKWKMLHYFAQNFFAPLLPVGFENENTFYIYGVSDLHSDYSMTLSVRVHTWSSLEPVCSRVTERFVMKGGEAVCLYEEPVSELLRRCGNCTRESCVVSFYLSADHELLSPTNYHFLSSPKEAVGLCKAQITAIISQQGDIFVFDLETSAVAPFVWLDVGSIPGRFSDNGFLMTEKTRTILFYPWEPTSKNELEQSFHVTSLTDIYXRNLGCIFSGQWE

SEQ ID NO: 1079 - protein, 2488 aa, Homo Sapiens
  misc_feature (2469)..(2469): Xaa can be any naturally occurring amino acid
MATVVVEATEPEPSGSIANPAASTSPSLSHRFLDSKFYLLVVVGEIVTEEHLRRAIGNIELGIRSWDTNLIECNLDQELKLFVSRHSARFSPEVPGQKILHHRSDVLETVVLINPSDEAVSTEVRLMITDAARHKLLVLTGQCFENTGELILQSGSFSFQNFIEIFTDQEIGELLSTTHPANKASLTLFCPEEGDWKNSNLDRHNLQDFINIKLNSASILPEMEGLSEFTEYLSESVEVPSPFDILEPPTSGGFLKLSKPCCYIFPGGRGDSALFAVNGFNMLINGGSERKSCFWKLIRHLDRVDSILLTHIGDDNLPGINSMLQRKIAELEEEQSQGSTTNSDWMKNLISPDLGVVFLNVPENLKNPEPNIKMKRSIEEACFTLQYLNKLSMKPEPLFRSVGNTIDPVILFQKMGVGKLEMYVLNPVKSSKEMQYFMQQWTGTNKDKAEFILPNGQEVDLPISYLTSVSSLIVWHPANPAEKIIRVLFPGNSTQYNILEGLEKLKHLDFLKQPLATQKDLTGQVPTPVVKQTKLKQRADSRESLKPAAKPLPSKSVRKESKEETPEVTKVNHVEKPPKVESKEKVMVKKDKPIKTETKPSVTEKEVPSKEEPSPVKAEVAEKQATDVKPKAAKEKTVKKETKVKPEDKKEEKEKPKKEVAKKEDKTPIKKEEKPKKEEVKKEVKKEIKKEEKKEPKKEVKKETPPKEVKKEVKKEEKKEVKKEEKEPKKEIKKLPKDAKKSSTPLSEAKKPAALKPKVPKKEESVKKDSVAAGKPKEKGKIKVIKKEGKAAEAVAAAVGTGATTAAVMAAAGIAAIGPAKELEAERSLMSSPEDLTKDFEELKAEEVDVTKDIKPQLELIEDEEKLKETEPVEAYVIQKEREVTKGPAESPDEGITTTEGEGECEQTPEELEPVEKQGVDDIEKFEDEGAGFEESSETGDYEEKAETEEAEEPEEDGEEHVCVSASKHSPTEDEESAKAEADAYIREKRESVASGDDRAEEDMDEAIEKGEAEQSEEEADEEDKAEDAREEEYEPEKMEAEDYVMAVVDKAAEAGGAEEQYGFLTTPTKQLGAQSPGREPASSIHDETLPGGSESEATASDEENREDQPEEFTATSGYTQSTIEISSEPTPMDEMSTPRDVMSDETNNEETESPSQEFVNITKYESSLYSQEYSKPADVTPLNGFSEGSKTDATDGKDYNASASTISPPSSMEEDKFSRSALRDAYCSEVKASTTLDIKDSISAVSSEKVSPSKSPSLSPSPPSPLEKTPLGERSVNFSLTPNEIKVSAEAEVAPVSPEVTQEVVEEHCASPEDKTLEVVSPSQSVTGSAGHTPYYQSPTDEKSSHLPTEVIEKPPAVPVSFEFSDAKDENERASVSPMDEPVPDSESPIEKVLSPLRSPPLIGSESAYESFLSADDKASGRGAESPFEEKSGKQGSPDQVSPVSEMTSTSLYQDKQEGKSTDFAPIKEDFGQEKKTDDVEAMSSQPALALDERKLGDVSPTQIDVSQFGSFKEDTKMSISEGTVSDKSATPVDEGVAEDTYSHMEGVASVSTASVATSSFPEPTTDDVSPSLHAEVGSPHSTEVDDSLSVSVVQTPTTFQETEMSPSKEECPRPMSISPPDFSPKTAKSRTPVQDHRSEQSSMSIEFGQESPEQSLAMDFSRQSPDHPTVGAGVLHITENGPTEVDYSPSDMQDSSLSHKIPPMEEPSYTQDNDLSELISVSQVEASPSTSSAHTPSQIASPLQEDTLSDVAPPRDMSLYASLTSEKVQSLEGEKLSPKSDISPLTPRESSPLYSPTFSDSTSAVKEKTATCHSSSSPPIDAASAEPYGFRASVLFDTMQHHLALNRDLSTPGLEKDSGGKTPGDFSYAYQKPEETTRSPDEEDYDYESYEKTTRTSDVGGYYYEKIERTTKSPSDSGYSYETIGKTTKTPEDGDYSYEIIEKTTRTPEEGGYSYDISEKTTSPPEVSGYSYEKTERSRRLLDDISNGYDDSEDGGHTLGDPSYSYETTEKITSFPESEGYSYETSTKTTRTPDTSTYCYETAEKITRTPQASTYSYETSDLCYTAEKKSPSEARQDVDLCLVSSCEYKHPKTELSPSFINPNPLEWFASEEPTEESEKPLTQSGGAPPPPGGKQQGRQCDETPPTSVSESAPSQTDSDVPPETEECPSITADANIDSEDESETIPTDKTVTYKHMDPPPAPVQDRSPSPRHPDVSMVDPEALAIEQNLGKALKKDLKEKTKTKKPGTKTKSSSPVKKSDGKSKPLAASPKPAGLKESSDKVSRVASPKKKESVEKAAKPTTTPEVKAARGEEKDKETKNAANASASKSAKTATAGPGTTKTTKSSAVPPGLPVYLDLCYIPNHSNSKNVDVEFFKRVRSSYYVVSGNDPAAEEPSRAVLDALLEGKAQWGSNMQVTLIPTHDSEVMREWYQETHEKQQDLNIMVLASSSTVVMQDESFPACKIELXKPRPATPQDLNFVSRNSSI

SEQ ID NO: 1080 - protein, 1388 aa, Homo Sapiens
  misc_feature (1375)..(1375): Xaa can be any naturally occurring amino acid
MSTEADEGITFSVPPFAPSGFCTIPEGGICRRGGAAAVGEGEEHQLPPPPPGSFWNVESAAAPGIGCPAATSSSSATRGRGSSVGGGSRRTTVAYVINEASQGQLVVAESEALQSLREACETVGATLETLHFGKLDFGETTVLDRFYNADIAVVEMSDAFRQPSLFYHLGVRESFSMANNIILYCDTNSDSLQSLKEIICQKNTMCTGNYTFVPYMITPHNKVYCCDSSFMKGLTELMQPNFELLLGPICLPLVDRFIQLLKVAQASSSQYFRESILNDIRKARNLYTGKELAAELARIRQRVDNIEVLTADIVINLLLSYRDIQDYDSIVKLVETLEKLPTFDLASHHHVKFHYAFALNRRNLPGDRAKALDIMIPMVQSEGQVASDMYCLVGRIYKDMFLDSNFTDTESRDHGASWFKKAFESEPTLQSGINYAVLLLAAGHQFESSFELRKVGVKLSSLLGKKGNLEKLQSYWEVGFFLGASVLANDHMRVIQASEKLFKLKTPAWYLKSIVETILIYKHFVKLTTEQPVAKQELVDFWMDFLVEATKTDVTVVRFPVLILEPTKIYQPSYLSINNEVEEKTISIWHVLPDDKKGIHEWNFSASSVRGVSISKFEERCCFLYVLHNSDDFQIYFCTELHCKKFFEMVNTITEEKGRSTEEGDCESDLLEYDYEYDENGDRVVLGKGTYGIVYAGRDLSNQVRIAIKEIPERDSRYSQPLHEEIALHKHLKHKNIVQYLGSFSENGFIKIFMEQVPGGSLSALLRSKWGPLKDNEQTIGFYTKQILEGLKYLHDNQIVHRDIKGDNVLINTYSGVLKISDFGTSKRLAGINPCTETFTGTLQYMAPEIIDKGPRGYGKAADIWSLGCTIIEMATGKPPFYELGEPQAAMFKVGMFKVHPEIPESMSAEAKAFILKCFEPDPDKRACANDLLVDEFLKVSSKKKKTQPKLSALSAGSNEYLRSISLPVPVLVEDTSSSSEYGSVSPDTELKVDPFSFKTRAKSCGERDVKGIRTLFLGIPDENFEDHSAPPSPEEKDSGFFMLRKDSERRATLHRILTEDQDKIVRNLMESLAQGAEEPKLKWEHITTLIASLREFVRSTDRKIIATTLSKLKLELDFDSHGISQVQVVLFGFQDAVNKVLRNHNIKPHWMFALDSIIRKAVQTAITILVPELRPHFSLASESDTADQEDLDVEDDHEEQPSNQTVRRPQAVIEDAVATSGVSTLSSTVSHDSQSAHRSLNVQLGRMKIETNRLLEELVRKEKELQALLHRAIEEKDQEIKHLKLKSQPIEIPELPVFHLNSSGTNTEDSELTDWLRVNGADEDTISRFLAEDYTLLDVLYYVTRDDLKCLRLRGGMLCTLWKAIIDFRNKQTXLLLNLIFDGNSKN

SEQ ID NO: 1081 - protein, 391 aa, Homo Sapiens
  misc_feature (384)..(384): Xaa can be any naturally occurring amino acid
MAEPRQEFEVMEDHAGTYGLGDRKDQGGYTMHQDQEGDTDAGLKAEEAGIGDTPSLEDEAAGHVTQARMVSKSKDGTGSDDKKAKGADGKTKIATPRGAAPPGQKGQANATRIPAKTPPAPKTPPSSGEPPKSGDRSGYSSPGSPGTPGSRSRTPSLPTPPTREPKKVAVVRTPPKSPSSAKSRLQTAPVPMPDLKNVKSKIGSTENLKHQPGGGKVQIINKKLDLSNVQSKCGSKDNIKHVPGGGSVQIVYKPVDLSKVTSKCGSLGNIHHKPGGGQVEVKSEKLDFKDRVQSKIGSLDNITHVPGGGNKKIETHKLTFRENAKAKTDHGAEIVYKSPVVSGDTSPRHLSNVSSTGSIDMVDSPQLATLADEVSASLAKQGLXSGPWGGQ

SEQ ID NO: 1082 - protein, 360 aa, Homo Sapiens
  misc_feature (353)..(353): Xaa can be any naturally occurring amino acid
MAEPRQEFEVMEDHAGTYGLGDRKDQGGYTMHQDQEGDTDAGLKAEEAGIGDTPSLEDEAAGHVTQARMVSKSKDGTGSDDKKAKGADGKTKIATPRGAAPPGQKGQANATRIPAKTPPAPKTPPSSGEPPKSGDRSGYSSPGSPGTPGSRSRTPSLPTPPTREPKKVAVVRTPPKSPSSAKSRLQTAPVPMPDLKNVKSKIGSTENLKHQPGGGKVQIVYKPVDLSKVTSKCGSLGNIHHKPGGGQVEVKSEKLDFKDRVQSKIGSLDNITHVPGGGNKKIETHKLTFRENAKAKTDHGAEIVYKSPVVSGDTSPRHLSNVSSTGSIDMVDSPQLATLADEVSASLAKQGLXSGPWGGQ

SEQ ID NO: 1083 - protein, 338 aa, Homo Sapiens
  misc_feature (333)..(333): Xaa can be any naturally occurring amino acid
MGAQFSKTAAKGEAAAERPGEAAVASSPSKANGQENGHVKVNGDASPAAAESGAKEELQANGSAPAADKEEPAAAGSGAASPSAAEKGEPAAAAAPEAGASPVEKEAPAEGEAAEPGSPTAAEGEAASAASSTSSPKAEDGATPSPSNETPKKKKKRFSFKKSFKLSGFSFKKNKKEAGEGGEAEAPAAEGGKDEAAGGAAAAAAEAGAASGEQAAAPGEEAAAGEEGAAGGDPQEAKPQEAAVAPEKPPASDETKAAEEPSKVEEKKAEEAGASAAACEAPSAAGPGAPPEQEAAPAEEPAAAAASSACAAPSQEAQPECSPEAPPAEAAEXKSKLL

SEQ ID NO: 1084 - protein, 698 aa, Homo Sapiens
  misc_feature (687)..(687): Xaa can be any naturally occurring amino acid
MRLLTLLGLLCGSVATPLGPKWPEPVFGRLASPGFPGEYANDQERRWTLTAPPGYRLRLYFTHFDLELSHLCEYDFVKLSSGAKVLATLCGQESTDTERAPGKDTFYSLGSSLDITFRSDYSNEKPFTGFEAFYAAEDIDECQVAPGEAPTCDHHCHNHLGGFYCSCRAGYVLHRNKRTCSALCSGQVFTQRSGELSSPEYPRPYPKLSSCTYSISLEEGFSVILDFVESFDVETHPETLCPYDFLKIQTDREEHGPFCGKTLPHRIETKSNTVTITFVTDESGDHTGWKIHYTSTAQPCPYPMAPPNGHVSPVQAKYILKDSFSIFCETGYELLQGHLPLKSFTAVCQKDGSWDRPMPACSIVDCGPPDDLPSGRVEYITGPGVTTYKAVIQYSCEETFYTMKVNDGKYVCEADGFWTSSKGEKSLPVCEPVCGLSARTTGGRIYGGQKAKPGDFPWQVLILGGTTAAGALLYDNWVLTAAHAVYEQKHDASALDIRMGTLKRLSPHYTQAWSEAVFIHEGYTHDAGFDNDIALIKLNNKVVINSNITPICLPRKEAESFMRTDDIGTASGWGLTQRGFLARNLMYVDIPIVDHQKCTAAYEKPPYPRGSVTANMLCAGLESGGKDSCRGDSGGALVFLDSETERWFVGGIVSWGSMNCGEAGQYGVYTKVINYIPWIENIISDFXLACLQSRILHF

SEQ ID NO: 1085 - protein, 211 aa, Homo Sapiens
  misc_feature (186)..(186): Xaa can be any naturally occurring amino acid
MRLLTLLGLLCGSVATPLGPKWPEPVFGRLASPGFPGEYANDQERRWTLTAPPGYRLRLYFTHFDLELSHLCEYDFVKLSSGAKVLATLCGQESTDTERAPGKDTFYSLGSSLDITFRSDYSNEKPFTGFEAFYAAEDIDECQVAPGEAPTCDHHCHNHLGGFYCSCRAGYVLHRNKRTCSEQSLXPPLELRPAQQVRSQSQPAGLSSGLG

SEQ ID NO: 1086 - protein, 198 aa, Homo Sapiens
  misc_feature (155)..(155): Xaa can be any naturally occurring amino acid
MGLSDGEWQLVLNVWGKVEADIPGHGQEVLIRLFKGHPETLEKFDKFKHLKSEDEMKASEDLKKHGATVLTALGGILKKKGHHEAEIKPLAQSHATKHKIPVKYLEFISECIIQVLQSKHPGDFGADAQGAMNKALELFRKDMASNYKELGFQGXAPAAPTPTHLGPGFKRERGLISCSHIEFASECLLCLVEVGRRS

SEQ ID NO: 1087 - protein, 290 aa, Homo Sapiens
  misc_feature (249)..(249): Xaa can be any naturally occurring amino acid
MSLFPSLPLLLLSMVAASYSETVTCEDAQKTCPAVIACSSPGINGFPGKDGRDGTKGEKGEPGQGLRGLQGPPGKLGPPGNPGPSGSPGPKGQKGDPGKSPDGDSSLAASERKALQTEMARIKKWLTFSLGKQVGNKFFLTNGEIMTFEKVKALCVKFQASVATPRNAAENGAIQNLIKEEAFLGITDEKTEGQFVDLTGNRLTYTNWNEGEPNNAGSDEDCVLLLKNGQWNDVPCSTSHLAVCEFPIXRVISLRPSLSFYCNPQAHSMLEKINYINFLISSIVPFVGNH

SEQ ID NO: 1088 - protein, 212 aa, Homo Sapiens
  misc_feature (198)..(198): Xaa can be any naturally occurring amino acid
MASQKRPSQRHGSKYLATASTMDHARHGFLPRHRDTGILDSIGRFFGGDRGAPKRGSGKVPWLKPGRSPLPSHARSQPGLCNMYKDSHHPARTAHYGSLPQKSHGRTQDENPVVHFFKNIVTPRTPPPSQGKGRGLSLSRFSWGAEGQRPGFGYGGRASDYKSAHKGFKGVDAQGTLSKIFKLGGRDSRSGSPMARRXKPTWFRNPVLSFLI

SEQ ID NO: 1089 - protein, 186 aa, Homo Sapiens
  misc_feature (172)..(172): Xaa can be any naturally occurring amino acid
MASQKRPSQRHGSKYLATASTMDHARHGFLPRHRDTGILDSIGRFFGGDRGAPKRGSGKDSHHPARTAHYGSLPQKSHGRTQDENPVVHFFKNIVTPRTPPPSQGKGRGLSLSRFSWGAEGQRPGFGYGGRASDYKSAHKGFKGVDAQGTLSKIFKLGGRDSRSGSPMARRXKPTWFRNPVLSFLI

SEQ ID NO: 1090 - protein, 175 aa, Homo Sapiens
  misc_feature (161)..(161): Xaa can be any naturally occurring amino acid
MASQKRPSQRHGSKYLATASTMDHARHGFLPRHRDTGILDSIGRFFGGDRGAPKRGSGKDSHHPARTAHYGSLPQKSHGRTQDENPVVHFFKNIVTPRTPPPSQGKGAEGQRPGFGYGGRASDYKSAHKGFKGVDAQGTLSKIFKLGGRDSRSGSPMARRXKPTWFRNPVLSFLI

SEQ ID NO: 1091 - protein, 213 aa, Homo Sapiens
  misc_feature (198)..(198): Xaa can be any naturally occurring amino acid
MGNHAGKRELNAEKASTNSETNRGESEKKRNLGELSRTTSEDNEVFGEADANQNNGTSSQDTAVTDSKRTADPKNAWQDAHPADPGSRPHLIRLFSRDAPGREDNTFKDRPSESDELQTIQEDSAATSESLDVMASQKRPSQRHGSKYLATASTMDHARHGFLPRHRDTGILDSIGRFFGGDRGAPKRGSGKVSSEEXRSFSLNGKSKGEISR

SEQ ID NO: 1092 - protein, 319 aa, Homo Sapiens
  misc_feature (305)..(305): Xaa can be any naturally occurring amino acid
MGNHAGKRELNAEKASTNSETNRGESEKKRNLGELSRTTSEDNEVFGEADANQNNGTSSQDTAVTDSKRTADPKNAWQDAHPADPGSRPHLIRLFSRDAPGREDNTFKDRPSESDELQTIQEDSAATSESLDVMASQKRPSQRHGSKYLATASTMDHARHGFLPRHRDTGILDSIGRFFGGDRGAPKRGSGKDSHHPARTAHYGSLPQKSHGRTQDENPVVHFFKNIVTPRTPPPSQGKGRGLSLSRFSWGAEGQRPGFGYGGRASDYKSAHKGFKGVDAQGTLSKIFKLGGRDSRSGSPMARRXKPTWFRNPVLSFLI

SEQ ID NO: 1093 - protein, 201 aa, Homo Sapiens
  misc_feature (187)..(187): Xaa can be any naturally occurring amino acid
MASQKRPSQRHGSKYLATASTMDHARHGFLPRHRDTGILDSIGRFFGGDRGAPKRGSGKVPWLKPGRSPLPSHARSQPGLCNMYKDSHHPARTAHYGSLPQKSHGRTQDENPVVHFFKNIVTPRTPPPSQGKGAEGQRPGFGYGGRASDYKSAHKGFKGVDAQGTLSKIFKLGGRDSRSGSPMARRXKPTWFRNPVLSFLI

SEQ ID NO: 1094 - protein, 538 aa, Homo Sapiens
  misc_feature (534)..(534): Xaa can be any naturally occurring amino acid
MKMRRYKLFLMFCMAGLCLISFLHFFKTLSYVTFPRELASLSPNLVSSFFWNNAPVTPQASPEPGGPDLLRTPLYSHSPLLQPLPPSKAAEELHRVDLVLPEDTTEYFVRTKAGGVCFKPGTKMLERPPPGRPEEKPEGANGSSARRPPRYLLSARERTGGRGARRKWVECVCLPGWHGPSCGVPTVVQYSNLPTKERLVPREVPRRVINAINVNHEFDLLDVRFHELGDVVDAFVVCESNFTAYGEPRPLKFREMLTNGTFEYIRHKVLYVFLDHFPPGGRQDGWIADDYLRTFLTQDGVSRLRNLRPDDVFIIDDADEIPARDGVLFLKLYDGWTEPFAFHMRKSLYGFFWKQPGTLEVVSGCTVDMLQAVYGLDGIRLRRRQYYTMPNFRQYENRTGHILVQWSLGSPLHFAGWHCSWCFTPEGIYFKLVSAQNGDFPRWGDYEDKRDLNYIRGLIRTGGWFDGTQQEYPPADPSEHMYAPKYLLKNYDRFHYLLDNPYQEPRSTAAGGWRHRGPEGRPPARGKLDEAEVXSCMI

SEQ ID NO: 1095 - protein, 4012 aa, Homo Sapiens
  misc_feature (3970)..(3970): Xaa can be any naturally occurring amino acid
MAHSCRWRFPARPGTTGGGGGGGRRGLGGAPRQRVPALLLPPGPPVGGGGPGAPPSPPAVAAAAAAAGSSGAGVPGGAAAASAASSSSASSSSSSSSSASSGPALLRVGPGFDAALQVSAAIGTNLRRFRAVFGESGGGGGSGEDEQFLGFGSDEEVRVRSPTRSPSVKTSPRKPRGRPRSGSDRNSAILSDPSVFSPLNKSETKSGDKIKKKDSKSIEKKRGRPPTFPGVKIKITHGKDISELPKGNKEDSLKKIKRTPSATFQQATKIKKLRAGKLSPLKSKFKTGKLQIGRKGVQIVRRRGRPPSTERIKTPSGLLINSELEKPQKVRKDKEGTPPLTKEDKTVVRQSPRRIKPVRIIPSSKRTDATIAKQLLQRAKKGAQKKIEKEAAQLQGRKVKTQVKNIRQFIMPVVSAISSRIIKTPRRFIEDEDYDPPIKIARLESTPNSRFSAPSCGSSEKSSAASQHSSQMSSDSSRSSSPSVDTSTDSQASEEIQVLPEERSDTPEVHPPLPISQSPENESNDRRSRRYSVSERSFGSRTTKKLSTLQSAPQQQTSSSPPPPLLTPPPPLQPASSISDHTPWLMPPTIPLASPFLPASTAPMQGKRKSILREPTFRWTSLKHSRSEPQYFSSAKYAKEGLIRKPIFDNFRPPPLTPEDVGFASGFSASGTAASARLFSPLHSGTRFDMHKRSPLLRAPRFTPSEAHSRIFESVTLPSNRTSAGTSSSGVSNRKRKRKVFSPIRSEPRSPSHSMRTRSGRLSSSELSPLTPPSSVSSSLSISVSPLATSALNPTFTFPSHSLTQSGESAEKNQRPRKQTSAPAEPFSSSSPTPLFPWFTPGSQTERGRNKDKAPEELSKDRDADKSVEKDKSRERDREREKENKRESRKEKRKKGSEIQSSSALYPVGRVSKEKVVGEDVATSSSAKKATGRKKSSSHDSGTDITSVTLGDTTAVKTKILIKKGRGNLEKTNLDLGPTAPSLEKEKTLCLSTPSSSTVKHSTSSIGSMLAQADKLPMTDKRVASLLKKAKAQLCKIEKSKSLKQTDQPKAQGQESDSSETSVRGPRIKHVCRRAAVALGRKRAVFPDDMPTLSALPWEEREKILSSMGNDDKSSIAGSEDAEPLAPPIKPIKPVTRNKAPQEPPVKKGRRSRRCGQCPGCQVPEDCGVCTNCLDKPKFGGRNIKKQCCKMRKCQNLQWMPSKAYLQKQAKAVKKKEKKSKTSEKKDSKESSVVKNVVDSSQKPTPSAREDPAPKKSSSEPPPRKPVEEKSEEGNVSAPGPESKQATTPASRKSSKQVSQPALVIPPQPPTTGPPRKEVPKTTPSEPKKKQPPPPESGPEQSKQKKVAPRPSIPVKQKPKEKEKPPPVNKQENAGTLNILSTLSNGNSSKQKIPADGVHRIRVDFKEDCEAENVWEMGGLGILTSVPITPRVVCFLCASSGHVEFVYCQVCCEPFHKFCLEENERPLEDQLENWCCRRCKFCHVCGRQHQATKQLLECNKCRNSYHPECLGPNYPTKPTKKKKVWICTKCVRCKSCGSTTPGKGWDAQWSHDFSLCHDCAKLFAKGNFCPLCDKCYDDDDYESKMMQCGKCDRWVHSKCENLSDEMYEILSNLPESVAYTCVNCTERHPAEWRLALEKELQISLKQVLTALLNSRTTSHLLRYRQAAKPPDLNPETEESIPSRSSPEGPDPPVLTEVSKQDDQQPLDLEGVKRKMDQGNYTSVLEFSDDIVKIIQAAINSDGGQPEIKKANSMVKSFFIRQMERVFPWFSVKKSRFWEPNKVSSNSGMLPNAVLPPSLDHNYAQWQEREENSHTEQPPLMKKIIPAPKPKGPGEPDSPTPLHPPTPPILSTDRSREDSPELNPPPGIEDNRQCALCLTYGDDSANDAGRLLYIGQNEWTHVNCALWSAEVFEDDDGSLKNVHMAVIRGKQLRCEFCQKPGATVGCCLTSCTSNYHFMCSRAKNCVFLDDKKVYCQRHRDLIKGEVVPENGFEVFRRVFVDFEGISLRRKFLNGLEPENIHMMIGSMTIDCLGILNDLSDCEDKLFPIGYQCSRVYWSTTDARKRCVYTCKIVECRPPVVEPDINSTVEHDENRTIAHSPTSFTESSSKESQNTAEIISPPSPDRPPHSQTSGSCYYHVISKVPRIRTPSYSPTQRSPGCRPLPSAGSPTPTTHEIVTVGDPLLSSGLRSIGSRRHSTSSLSPQRSKLRIMSPMRTGNTYSRNNVSSVSTTGTATDLESSAKVVDHVLGPLNSSTSLGQNTSTSSNLQRTVVTVGNKNSHLDGSSSSEMKQSSASDLVSKSSSLKGEKTKVLSSKSSEGSAHNVAYPGIPKLAPQVHNTTSRELNVSKIGSFAEPSSVSFSSKEALSFPHLHLRGQRNDRDQHTDSTQSANSSPDEDTEVKTLKLSGMSNRSSIINEHMGSSSRDRRQKGKKSCKETFKEKHSSKSFLEPGQVTTGEEGNLKPEFMDEVLTPEYMGQRPCNNVSSDKIGDKGLSMPGVPKAPPMQVEGSAKELQAPRKRTVKVTLTPLKMENESQSKNALKESSPASPLQIESTSPTEPISASENPGDGPVAQPSPNNTSCQDSQSNNYQNLPVQDRNLMLPDGPKPQEDGSFKRRYPRRSARARSNMFFGLTPLYGVRSYGEEDIPFYSSSTGKKRGKRSAEGQVDGADDLSTSDEDDLYYYNFTRTVISSGGEERLASHNLFREEEQCDLPKISQLDGVDDGTESDTSVTATTRKSSQIPKRNGKENGTENLKIDRPEDAGEKEHVTKSSVGHKNEPKMDNCHSVSRVKTQGQDSLEAQLSSLESSRRVHTSTPSDKNLLDTYNTELLKSDSDNNNSDDCGNILPSDIMDFVLKNTPSMQALGESPESSSSELLNLGEGLGLDSNREKDMGLFEVFSQQLPTTEPVDSSVSSSISAEEQFELPLELPSDLSVLTTRSPTVPSQNPSRLAVISDSGEKRVTITEKSVASSESDPALLSPGVDPTPEGHMTPDHFIQGHMDADHISSPPCGSVEQGHGNNQDLTRNSSTPGLQVPVSPTVPIQNQKYVPNSTDSPGPSQISNAAVQTTPPHLKPATEKLIVVNQNMQPLYVLQTLPNGVTQKIQLTSSVSSTPSVMETNTSVLGPMGGGLTLTTGLNPSLPTSQSLFPSASKGLLPMSHHQHLHSFPAATQSSFPPNISNPPSGLLIGVQPPPDPQLLVSESSQRTDLSTTVATPSSGLKKRPISRLQTRKNKKLAPSSTPSNIAPSDVVSNMTLINFTPSQLPNHPSLLDLGSLNTSSHRTVPNIIKRSKSSIMYFEPAPLLPQSVGGTAATAAGTSTISQDTSHLTSGSVSGLASSSSVLNVVSMQTTTTPTSSASVPGHVTLTNPRLLGTPDIGSISNLLIKASQQSLGIQDQPVALPPSSGMFPQLGTSQTPSTAAITAASSICVLPSTQTTGITAASPSGEADEHYQLQHVNQLLASKTGIHSSQRDLDSASGPQVSNFTQTVDAPNSMGLEQNKALSSAVQASPTSPGGSPSSPSSGQRSASPSVPGPTKPKPKTKRFQLPLDKGNGKKHKVSHLRTSSSEAHIPDQETTSLTSGTGTPGAEAEQQDTASVEQSSQKECGQPAGQVAVLPEVQVTQNPANEQESAEPKTVEEEESNFSSPLMLWLQQEQKRKESITEKKPKKGLVFEISSDDGFQICAESIEDAWKSLTDKVQEARSNARLKQLSFAGVNGLRMLGILHDAVVFLIEQLSGAKHCRNYKFRFHKPEEANEPPLNPHGSARAEVHLRKSAFDMFNFLASKHRQPPEYNPNDEEEEEVQLKSARRATSMDLPMPMRFRHLKKTSKEAVGVYRSPIHGRGLFCKRNIDAGEMVIEYAGNVIRSIQTDKREKYYDSKGIGCYMFRIDDSEVVDATMHGNAARFINHSCEPNCYSRVINIDGQKHIVIFAMRKIYRGEELTYDYKFPIEDASNKLPCNCGAKKCRKFLNXSCSSPPVLECKEAGPSKATLKAFSSSWELPDCVAQLRGLCDG

SEQ ID NO: 1096 - protein, 5665 aa, Homo Sapiens
  misc_feature (5538)..(5538): Xaa can be any naturally occurring amino acid
MDSQKLAGEDKDSEPAADGPAASEDPSATESDLPNPHVGEVSVLSSGSPRLQETPQDCSGGPVRRCALCNCGEPSLHGQRELRRFELPFDWPRCPVVSPGGSPGPNEAVLPSEDLSQIGFPEGLTPAHLGEPGGSCWAHHWCAAWSAGVWGQEGPELCGVDKAIFSGISQRCSHCTRLGASIPCRSPGCPRLYHFPCATASGSFLSMKTLQLLCPEHSEGAAYLEEARCAVCEGPGELCDLFFCTSCGHHYHGACLDTALTARKRAGWQCPECKVCQACRKPGNDSKMLVCETCDKGYHTFCLKPPMEELPAHSWKCKACRVCRACGAGSAELNPNSEWFENYSLCHRCHKAQGGQTIRSVAEQHTPVCSRFSPPEPGDTPTDEPDALYVACQGQPKGGHVTSMQPKEPGPLQCEAKPLGKAGVQLEPQLEAPLNEEMPLLPPPEESPLSPPPEESPTSPPPEASRLSPPPEELPASPLPEALHLSRPLEESPLSPPPEESPLSPPPESSPFSPLEESPLSPPEESPPSPALETPLSPPPEASPLSPPFEESPLSPPPEELPTSPPPEASRLSPPPEESPMSPPPEESPMSPPPEASRLFPPFEESPLSPPPEESPLSPPPEASRLSPPPEDSPMSPPPEESPMSPPPEVSRLSPLPVVSRLSPPPEESPLSPPPEESPTSPPPEASRLSPPPEDSPTSPPPEDSPASPPPEDSLMSLPLEESPLLPLPEEPQLCPRSEGPHLSPRPEEPHLSPRPEEPHLSPQAEEPHLSPQPEEPCLCAVPEEPHLSPQAEGPHLSPQPEELHLSPQTEEPHLSPVPEEPCLSPQPEESHLSPQSEEPCLSPRPEESHLSPELEKPPLSPRPEKPPEEPGQCPAPEELPLFPPPGEPSLSPLLGEPALSEPGEPPLSPLPEELPLSPSGEPSLSPQLMPPDPLPPPLSPIITAAAPPALSPLGELEYPFGAKGDSDPESPLAAPILETPISPPPEANCTDPEPVPPMILPPSPGSPVGPASPILMEPLPPQCSPLLQHSLVPQNSPPSQCSPPALPLSVPSPLSPIGKVVGVSDEAELHEMETEKVSEPECPALEPSATSPLPSPMGDLSCPAPSPAPALDDFSGLGEDTAPLDGIDAPGSQPEPGQTPGSLASELKGSPVLLDPEELAPVTPMEVYPECKQTAGQGSPCEEQEEPRAPVAPTPPTLIKSDIVNEISNLSQGDASASFPGSEPLLGSPDPEGGGSLSMELGVSTDVSPARDEGSLRLCTDSLPETDDSLLCDAGTAISGGKAEGEKGRRRSSPARSRIKQGRSSSFPGRRRPRGGAHGGRGRGRARLKSTASSIETLVVADIDSSPSKEEEEEDDDTMQNTVVLFSNTDKFVLMQDMCVVCGSFGRGAEGHLLACSQCSQCYHPYCVNSKITKVMLLKGWRCVECIVCEVCGQASDPSRLLLCDDCDISYHTYCLDPPLLTVPKGGWKCKWCVSCMQCGAASPGFHCEWQNSYTHCGPCASLVTCPICHAPYVEEDLLIQCRHCERWMHAGCESLFTEDDVEQAADEGFDCVSCQPYVVKPVAPVAPPELVPMKVKEPEPQYFRFEGVWLTETGMALLRNLTMSPLHKRRQRRGRLGLPGEAGLEGSEPSDALGPDDKKDGDLDTDELLKGEGGVEHMECEIKLEGPVSPDVEPGKEETEESKKRKRKPYRPGIGGFMVRQRKSHTRTKKGPAAQAEVLSGDGQPDEVIPADLPAEGAVEQSLAEGDEKKKQQRRGRKKSKLEDMFPAYLQEAFFGKELLDLSRKALFAVGVGRPSFGLGTPKAKGDGGSERKELPTSQKGDDGPDIADEESRGLEGKADTPGPEDGGVKASPVPSDPEKPGTPGEGMLSSDLDRISTEELPKMESKDLQQLFKDVLGSEREQHLGCGTPGLEGSRTPLQRPFLQGGLPLGNLPSSSPMDSYPGLCQSPFLDSRERGGFFSPEPGEPDSPWTGSGGTTPSTPTTPTTEGEGDGLSYNQRSLQRWEKDEELGQLSTISPVLYANINFPNLKQDYPDWSSRCKQIMKLWRKVPAADKAPYLQKAKDNRAAHRINKVQKQAESQINKQTKVGDIARKTDRPALHLRIPPQPGALGSPPPAAAPTIFIGSPTTPAGLSTSADGFLKPPAGSVPGPDSPGELFLKLPPQVPAQVPSQDPFGLAPAYPLEPRFPTAPPTYPPYPSPTGAPAQPPMLGASSRPGAGQPGEFHTTPPGTPRHQPSTPDPFLKPRCPSLDNLAVPESPGVGGGKASEPLLSPPPFGESRKALEVKKEELGASSPSYGPPNLGFVDSPSSGTHLGGLELKTPDVFKAPLTPRASQVEPQSPGLGLRPQEPPPAQALAPSPPSHPDIFRPGSYTDPYAQPPLTPRPQPPPPESCCALPPRSLPSDPFSRVPASPQSQSSSQSPLTPRPLSAEAFCPSPVTPRFQSPDPYSRPPSRPQSRDPFAPLHKPPRPQPPEVAFKAGSLAHTSLGAGGFPAALPAGPAGELHAKVPSGQPPNFVRSPGTGAFVGTPSPMRFTFPQAVGEPSLKPPVPQPGLPPPHGINSHFGPGPTLGKPQSTNYTVATGNFHPSGSPLGPSSGSTGESYGLSPLRPPSVLPPPAPDGSLPYLSHGASQRSGITSPVEKREDPGTGMGSSLATAELPGTQDPGMSGLSQTELEKQRQRQRLRELLIRQQIQRNTLRQEKETAAAAAGAVGPPGSWGAEPSSPAFEQLSRGQTPFAGTQDKSSLVGLPPSKLSGPILGPGSFPSDDRLSRPPPPATPSSMDVNSRQLVGGSQAFYQRAPYPGSLPLQQQQQQLWQQQQATAATSMRFAMSARFPSTPGPELGRQALGSPLAGISTRLPGPGEPVPGPAGPAQFIELRHNVQKGLGPGGTPFPGQGPPQRPRFYPVSEDPHRLAPEGLRGLAVSGLPPQKPSAPPAPELNNSLHPTPHTKGPTLPTGLELVNRPPSSTELGRPNPLALEAGKLPCEDPELDDDFDAHKALEDDEELAHLGLGVDVAKGDDELGTLENLETNDPHLDDLLNGDEFDLLAYTDPELDTGDKKDIFNEHLRLVESANEKAEREALLRGVEPGPLGPEERPPPAADASEPRLASVLPEVKPKVEEGGRHPSPCQFTIATPKVEPAPAANSLGLGLKPGQSMMGSRDTRMGTGPFSSSGHTAEKASFGATGGPPAHLLTPSPLSGPGGSSLLEKFELESGALTLPGGPAASGDELDKMESSLVASELPLLIEDLLEHEKKELQKKQQLSAQLQPAQQQQQQQQQHSLLSAPGPAQAMSLPHEGSSPSLAGSQQQLSLGLAGARQPGLPQPLMPTQPPAHALQQRLAPSMAMVSNQGHMLSGQHGGQAGLVPQQSSQPVLSQKPMGTMPPSMCMKPQQLAMQQQLANSFFPDTDLDKFAAEDIIDPIAKAKMVALKGIKKVMAQGSIGVAPGMNRQQVSLLAQRLSGGPSSDLQNHVAAGSGQERSAGDPSQPRPNPPTFAQGVINEADQRQYEEWLFHTQQLLQMQLKVLEEQIGVHRKSRKALCAKQRTAKKAGREFPEADAEKLKLVTEQQSKIQKQLDQVRKQQKEHTNLMAEYRNKQQQQQQQQQQQQQQHSAVLALSPSQSPRLLTKLPGQLLPGHGLQPPQGPPGGQAGGLRLTPGGMALPGQPGGPFLNTALAQQQQQQHSGGAGSLAGPSGGFFPGNLALRSLGPDSRLLQERQLQLQQQRMQLAQKLQQQQQQQQQQQHLLGQVAIQQQQQQGPGVQTNQALGPKPQGLMPPSSHQGLLVQQLSPQPPQGPQGMLGPAQVAVLQQQHPGALGPQGPHRQVLMTQSRVLSSPQLAQQGQGLMGHRLVTAQQQQQQQQHQQQGSMAGLSHLQQSLMSHSGQPKLSAQPMGSLQQLQQQQQLQQQQQLQQQQQQQLQQQQQLQQQQLQQQQQQQQLQQQQQQQLQQQQQQLQQQQQQQQQQFQQQQQQQQMGLLNQSRTLLSPQQQQQQQVALGPGMPAKPLQHFSSPGALGPTLLLTGKEQNTVDPAVSSEATEGPSTHQGGPLAIGTTPESMATEPGEVKPSLSGDSQLLLVQPQPQPQPSSLQLQPPLRLPGQQQQQVSLLHTAGGGSHGQLGSGSSSEASSVPHLLAQPSVSLGDQPGSMTQNLLGPQQPMLERPMQNNTGPQPPKPGPVLQSGQGLPGVGIMPTVGQLRAQLQGVLAKNPQLRHLSPQQQQQLQALLMQRQLQQSQAVRQTPPYQEPGTQTSPLQGLLGCQPQLGGFPGPQTGPLQELGAGPRPQGPPRLPAPPGALSTGPVLGPVHPTPPPSSPQEPKRPSQLPSPSSQLPTEAQLPPTHPGTPKPQGPTLEPPPGRVSPAAAQLADTLFSKGLGPWDPPDNLAETQKPEQSSLVPGHLDQVNGQVVPEASQLSIKQEPREEPCALGAQSVKREANGEPIGAPGTSNHLLLAGPRSEAGHLLLQKLLRAKNVQLSTGRGSEGLRAEINGHIDSKLAGLEQKLQGTPSNKEDAAARKPLTPKPKRVQKASDRLVSSRKKLRKEDGVRASEALLKQLKQELSLLPLTEPAITANFSLFAPFGSGCPVNGQSQLRGAFGSGALPTGPDYYSQLLTKNNLSNPPTPPSSLPPTPPPSVQQKMVNGVTPSEELGEHPKDAASARDSERALRDTSEVKSLDLLAALPTPPHNQTEDVRMESDEDSDSPDSIVPASSPESILGEEAPRFPHLGSGRWEQEDRALSPVIPLIPRASIPVFPDTKPYGALGLEVPGKLPVTTWEKGKGSEVSVMLTVSAAAAKNLNGVMVAVAELLSMKIPNSYEVLFPESPARAGTEPKKGEAEGPGGKEKGLEGKSPDTGPDWLKQFDAVLPGYTLKSQLDILSLLKQESPAPEPPTQHSYTYNVSNLDVRQLSAPPPEEPSPPPSPLAPSPASPPTEPLVELPTEPLAEPPVPSPLPLASSPESARPKPRARPPEEGEDSRPPRLKKWKGVRWKRLRLLLTIQKGSGRQEDEREVAEFMEQLGTALRPDKVPRDMRRCCFCHEEGDGATDGPARLLNLDLDLWVHLNCALWSTEVYETQGGALMNVEVALHRGLLTKCSLCQRTGATSSCNRMRCPNVYHFACAIRAKCMFFKDKTMLCPMHKIKGPCEQELSSFAVFRRVYIERDEVKQIASIIQRGERLHMFRVGGLVFHAIGQLLPHQMADFHSATALYPVGYEATRIYWSLRTNNRRCCYRCSIGENNGRPEFVIKVIEQGLEDLVFTDASPQAVWNRIIEPVAAMRKEADMLRLFPEYLKGEELFGLTVHAVLRIAESLPGVESCQNYLFRYGRHPLMELPLMINPTGCARSEPKILTHYKRPHTLNSTSMSKAYQSTFTGETNTPYSKQFVHSKSSQYRRLRTEWKNNVYLARSRIQGLGLYAAKDLEKHTMVIEYIGTIIRNEVANRREKIYEEQNRGIYMFRINNEHVIDATLTGGPARYINHSCAPNCVAEVVTFDKEDKIIIISSRRIPKGEELTYDYQFDFEDDQHKIPCHCGAWNCRKWMNXEALRLPGRGVPLPTTSSLKGMRGKRGSSQSQDPGLGLPADPEPLEQEAGAEGPRPSPPWAPGTILFPTTGPQAGISAPSSRRGQTEAAIGHLRFEGDMGRELPRSIWEAAGWGKRMCGRASQPCCSH

SEQ ID NO: 1097 - protein, 1100 aa, Homo Sapiens
  misc_feature (1094)..(1094): Xaa can be any naturally occurring amino acid
MKEMVGGCCVCSDERGWAENPLVYCDGHACSVAVHQACYGIVQVPTGPWFCRKCESQERAARVRCELCPHKDGALKRTDNGGWAHVVCALYIPEVQFANVLTMEPIVLQYVPHDRFNKTCYICEEQGRESKAASGACMTCNRHGCRQAFHVTCAQMAGLLCEEEVLEVDNVKYCGYCKYHFSKMKTSRHSSGGGGGGAGGGGGSMGGGGSGFISGRRSRSASPSTQQEKHPTHHERGQKKSRKDKERLKQKHKKRPESPPSILTPPVVPTADKVSSSASSSSHHEASTQETSESSRESKGKKSSSHSLSHKGKKLSSGKGVSSFTSASSSSSSSSSSSGGPFQPAVSSLQSSPDFSAFPKLEQPEEDKYSKPTAPAPSAPPSPSAPEPPKADLFEQKVVFSGFGPIMRFSTTTSSSGRARAPSPGDYKSPHVTGSGASAGTHKRMPALSATPVPADETPETGLKEKKHKASKRSRHGPGRPKGSRNKEGTGGPAAPSLPSAQLAGFTATAASPFSGGSLVSSGLGGLSSRTFGPSGSLPSLSLESPLLGAGIYTSNKDPISHSGGMLRAVCSTPLSSSLLGPPGTSALPRLSRSPFTSTLPSSSASISTTQVFSLAGSTFSLPSTHIFGTPMGAVNPLLSQAESSHTEPDLEDCSFRCRGTSPQESLSSMSPISSLPALFDQTASAPCGGGQLDPAAPGTTNMEQLLEKQGDGEAGVNIVEMLKALHALQKENQRLQEQILSLTAKKERLQILNVQLSVPFPALPAALPAANGPVPGPYGLPPQAGSSDSLSTSKSPPGKSSLGLDNSLSTSSEDPHSGCPSRSSSSLSFHSTPPPLPLLQQSPATLPLALPGAPAPLPPQPQNGLGRAPGAAGLGAMPMAEGLLGGLAGSGGLPLNGLLGGLNGAAAPNPASLSQAGGAPTLQLPGCLNSLTEQQRHLLQQQEQQLQQLQQLLASPQLTPEHQTVVYQMIQQIQQKRELQRLQMAGGSQLPMASLLAGSSTPLLSAGTPGLLPTASAPPLLPAGALVAPSLGNNTSLMAAAAAAAAVAAAGGPPVLTAQTNPFLSLSGAEGSGGGPKGGTADKGASANQEKGXIHPYPS

SEQ ID NO: 1098 - protein, 955 aa, Homo Sapiens
  misc_feature (950)..(950): Xaa can be any naturally occurring amino acid
MILSLLFSLGGPLGWGLLGAWAQASSTSLSDLQSSRTPGVWKAEAEDTSKDPVGRNWCPYPMSKLVTLLALCKTEKFLIHSQQPCPQGAPDCQKVKVMYRMAHKPVYQVKQKVLTSLAWRCCPGYTGPNCEHHDSMAIPEPADPGDSHQEPQDGPVSFKPGHLAAVINEVEVQQEQQEHLLGDLQNDVHRVADSLPGLWKALPGNLTAAVMEANQTGHEFPDRSLEQVLLPHVDTFLQVHFSPIWRSFNQSLHSLTQAIRNLSLDVEANRQAISRVQDSAVARADFQELGAKFEAKVQENTQRVGQLRQDVEDRLHAQHFTLHRSISELQADVDTKLKRLHKAQEAPGTNGSLVLATPGAGARPEPDSLQARLGQLQRNLSELHMTTARREEELQYTLEDMRATLTRHVDEIKELYSESDETFDQISKVERQVEELQVNHTALRELRVILMEKSLIMEENKEEVERQLLELNLTLQHLQGGHADLIKYVKDCNCQKLYLDLDVIREGQRDATRALEETQVSLDERRQLDGSSLQALQNAVDAVSLAVDAHKAEGERARAATSRLRSQVQALDDEVGALKAAAAEARHEVRQLHSAFAALLEDALRHEAVLAALFGEEVLEEMSEQTPGPLPLSYEQIRVALQDAASGLQEQALGWDELAARVTALEQASEPPRPAEHLEPSHDAGREEAATTALAGLARELQSLSNDVKNVGRCCEAEAGAGAASLNASLDGLHNALFATQRSLEQHQRLFHSLFGNFQGLMEANVSLDLGKLQTMLSRKGKKQQKDLEAPRKRDKKEAEPLVDIRVTGPVPGALGAALWEAGSPVAFYASFSEGTAALQTVKFNTTYINIGSSYFPEHGYFRAPERGVYLFAVSVEFGPGPGTGQLVFGGHHRTPVCTTGQGSGSTATVFAMAELQKGERVWFELTQGSITKRSLSGTAFGGFLMFKTXTPAPI

SEQ ID NO: 1099 - protein, 946 aa, Homo Sapiens
  misc_feature (940)..(940): Xaa can be any naturally occurring amino acid
MAAQPPRGIRLSALCPKFLHTNSTSHTWPFSAVAELIDNAYDPDVNAKQIWIDKTVINDHICLTFTDNGNGMTSDKLHKMLSFGFSDKVTMNGHVPVGLYGNGFKSGSMRLGKDAIVFTKNGESMSVGLLSQTYLEVIKAEHVVVPIVAFNKHRQMINLAESKASLAAILEHSLFSTEQKLLAELDAIIGKKGTRIIIWNLRSYKNATEFDFEKDKYDIRIPEDLDEITGKKGYKKQERMDQIAPESDYSLRAYCSILYLKPRMQIILRGQKVKTQLVSKSLAYIERDVYRPKFLSKTVRITFGFNCRNKDHYGIMMYHRNRLIKAYEKVGCQLRANNMGVGVVGIIECNFLKPTHNKQDFDYTNEYRLTITALGEKLNDYWNEMKVKKNTEYPLNLPVEDIQKRPDQTWVQCDACLKWRKLPDGMDQLPEKWYCSNNPDPQFRNCEVPEEPEDEDLVHPTYEKTYKKTNKEKFRIRQPEMIPRINAELLFRPTALSTPSFSSPKESVPRRHLSEGTNSYATRLLNNHQVPPQSEPESNSLKRRLSTRSSILNAKNRRLSSQFENSVYKGDDDDEDVIILEENSTPKPAVDHDIDMKSEQSHVEQGGVQVEFVGDSEPCGQTGSTSTSSSRCDQGNTAATQTEVPSLVVKKEETVEDEIDVRNDAVILPSCVEAEAKIHETQETTDKSADDAGCQLQELRNQLLLVTEEKENYKRQCHMFTDQIKVLQQRILEMNDKYVKKETCHQSTETDAVFLLESINGKSESPDHMVSQYQQALEEIERLKKQCSALQHVKAECSQCSNNESKSEMDEMAVQLDDVFRQLDKCSIERDQYKSEVELLEMEKSQIRSQCEELKTEVEQLKSTNQQTATDVSTSSNIEESVNHMDGESLKLRSLRVNVGQLLAMIVPDLDLQQVNYDVDVVDEILGQVVEQMSEISSTXSICYVR

SEQ ID NO: 1100 - protein, 1787 aa, Homo Sapiens
  misc_feature (1781)..(1781): Xaa can be any naturally occurring amino acid
MESNFNQEGVPRPSYVFSADPIARPSEINFDGIKLDLSHEFSLVAPNTEANSFESKDYLQVCLRIRPFTQSEKELESEGCVHILDSQTVVLKEPQCILGRLSEKSSGQMAQKFSFSKVFGPATTQKEFFQGCIMQPVKDLLKGQSRLIFTYGLTNSGKTYTFQGTEENIGILPRTLNVLFDSLQERLYTKMNLKPHRSREYLRLSSEQEKEEIASKSALLRQIKEVTVHNDSDDTLYGSLTNSLNISEFEESIKDYEQANLNMANSIKFSVWVSFFEIYNEYIYDLFVPVSSKFQKRKMLRLSQDVKGYSFIKDLQWIQVSDSKEAYRLLKLGIKHQSVAFTKLNNASSRSHSIFTVKILQIEDSEMSRVIRVSELSLCDLAGSERTMKTQNEGERLRETGNINTSLLTLGKCINVLKNSEKSKFQQHVPFRESKLTHYFQSFFNGKGKICMIVNISQCYLAYDETLNVLKFSAIAQKVCVPDTLNSSQEKLFGPVKSSQDVSLDSNSNSKILNVKRATISWENSLEDLMEDEDLVEELENAEETQNVETKLLDEDLDKTLEENKAFISHEEKRKLLDLIEDLKKKLINEKKEKLTLEFKIREEVTQEFTQYWAQREADFKETLLQEREILEENAERRLAIFKDLVGKCDTREEAAKDICATKVETEEATACLELKFNQIKAELAKTKGELIKTKEELKKRENESDSLIQELETSNKKIITQNQRIKELINIIDQKEDTINEFQNLKSHMENTFKCNDKADTSSLIINNKLICNETVEVPKDSKSKICSERKRVNENELQQDEPPAKKGSIHVSSAITEDQKKSEEVRPNIAEIEDIRVLQENNEGLRAFLLTIENELKNEKEEKAELNKQIVHFQQELSLSEKKNLTLSKEVQQIQSNYDIAIAELHVQKSKNQEQEEKIMKLSNEIETATRSITNNVSQIKLMHTKIDELRTLDSVSQISNIDLLNLRDLSNGSEEDNLPNTQLDLLGNDYLVSKQVKEYRIQEPNRENSFHSSIEAIWEECKEIVKASSKKSHQIEELEQQIEKLQAEVKGYKDENNRLKEKEHKNQDDLLKEKETLIQQLKEELQEKNVTLDVQIQHVVEGKRALSELTQGVTCYKAKIKELETILETQKVECSHSAKLEQDILEKESIILKLERNLKEFQEHLQDSVKNTKDLNVKELKLKEEITQLTNNLQDMKHLLQLKEEEEETNRQETEKLKEELSASSARTQNLKADLQRKEEDYADLKEKLTDAKKQIKQVQKEVSVMRDEDKLLRIKINELEKKKNQCSQELDMKQRTIQQLKEQLNNQKVEEAIQQYERACKDLNVKEKIIEDMRMTLEEQEQTQVEQDQVLEAKLEEVERLATELEKWKEKCNDLETKNNQRSNKEHENNTDVLGKLTNLQDELQESEQKYNADRKKWLEEKMMLITQAKEAENIRNKEMKKYAEDRERFFKQQNEMEILTAQLTEKDSDLQKWREERDQLVAALEIQLKALISSNVQKDNEIEQLKRIISETSKIETQIMDIKPKRISSADPDKLQTEPLSTSFEISRNKIEDGSVVLDSCEVSTENDQSTRFPKPELEIQFTPLQPNKMAVKHPGCTTPVTVKIPKARKRKSNEMEEDLVKCENKKNATPRTNLKFPISDDRNSSVKKEQKVAIRPSSKKTYSLRSQASIIGVNLATKKKEGTLQKFGDFLQHSPSILQSKAKKIIETMSSSKLSNVEASKENVSQPKRAKRKLYTSEISSPIDISGQVILMDQKMKESDHQIIKRRLRTKTAKXITYGNV

SEQ ID NO: 1101 - protein, 715 aa, Homo Sapiens
  misc_feature (712)..(712): Xaa can be any naturally occurring amino acid
MGWLPLLLLLTQCLGVPGQRSPLNDFQVLRGTELQHLLHAVVPGPWQEDVADAEECAGRCGPLMDCRAFHYNVSSHGCQLLPWTQHSPHTRLRRSGRCDLFQKKDYVRTCIMNNGVGYRGTMATTVGGLPCQAWSHKFPNDHKYTPTLRNGLEENFCRNPDGDPGGPWCYTTDPAVRFQSCGIKSCREAACVWCNGEEYRGAVDRTESGRECQRWDLQHPHQHPFEPGKFLDQGLDDNYCRNPDGSERPWCYTTDPQIEREFCDLPRCGSEAQPRQEATTVSCFRGKGEGYRGTANTTTAGVPCQRWDAQIPHQHRFTPEKYACKDLRENFCRNPDGSEAPWCFTLRPGMRAAFCYQIRRCTDDVRPQDCYHGAGEQYRGTVSKTRKGVQCQRWSAETPHKPQFTFTSEPHAQLEENFCRNPDGDSHGPWCYTMDPRTPFDYCALRRCADDQPPSILDPPDQVQFEKCGKRVDRLDQRRSKLRVVGGHPGNSPWTVSLRNRQGQHFCGGSLVKEQWILTARQCFSSCHMPLTGYEVWLGTLFQNPQHGEPSLQRVPVAKMVCGPSGSQLVLLKLERSVTLNQRVALICLPPEWYVVPPGTKCEIAGWGETKGTGNDTVLNVALLNVISNQECNIKHRGRVRESEMCTEGLLAPVGACEGDYGGPLACFTHNCWVLEGIIIPNRVCARSRWPAVFTRVSVFVDWIHKVMRLGXAQP

SEQ ID NO: 1102 - protein, 379 aa, Homo Sapiens
  misc_feature (376)..(376): Xaa can be any naturally occurring amino acid
MQKLQLCVYIYLFMLIVAGPVDLNENSEQKENVEKEGLCNACTWRQNTKSSRIEAIKIQILSKLRLETAPNISKDVIRQLLPKAPPLRELIDQYDVQRDDSSDGSLEDDDYHATTETIITMPTESDFLMQVDGKPKCCFFKFSSKIQYNKVVKAQLWIYLRPVETPTTVFVQILRLIKPMKDGTRYTGIRSLKLDMNPGTGIWQSIDVKTVLQNWLKQPESNLGIEIKALDENGHDLAVTFPGPGEDGLNPFLEVKVTDTPKRSRRDFGLDCDEHSTESRCCRYPLTVDFEAFGWDWIIAPKRYKANYCSGECEFVFLQKYPHTHLVHQANPRGSAGPCCTPTKMSPINMLYFNGKEQIIYGKIPAMVVDRCGCSXDLY

SEQ ID NO: 1103 - protein, 72 aa, Homo Sapiens
  misc_feature (62)..(62): Xaa can be any naturally occurring amino acid
MDPNCSCSPVGSCACAGSCKCKECKCTSCKKSCCSCCPVGCAKCAQGCICKGTSDKCSCCAXCQDSCALRCK

SEQ ID NO: 1104 - protein, 100 aa, Homo Sapiens
  misc_feature (62)..(62): Xaa can be any naturally occurring amino acid
MDPNCSCAAGDSCTCAGSCKCKECKCTSCKKSCCSCCPVGCAKCAQGCICKGASDKCSCCAXCWDSPAPRCKERDFHKPGFFMYNPDRDRLLYSFFYEIM

SEQ ID NO: 1105 - protein, 760 aa, Homo Sapiens
  misc_feature (751)..(751): Xaa can be any naturally occurring amino acid
MLRAKNQLFLLSPHYLRQVKESSGSRLIQQRLLHQQQPLHPEWAALAKKQLKGKNPEDLIWHTPEGISIKPLYSKRDTMDLPEELPGVKPFTRGPYPTMYTFRPWTIRQYAGFSTVEESNKFYKDNIKAGQQGLSVAFDLATHRGYDSDNPRVRGDVGMAGVAIDTVEDTKILFDGIPLEKMSVSMTMNGAVIPVLANFIVTGEEQGVPKEKLTGTIQNDILKEFMVRNTYIFPPEPSMKIIADIFEYTAKHMPKFNSISISGYHMQEAGADAILELAYTLADGLEYSRTGLQAGLTIDEFAPRLSFFWGIGMNFYMEIAKMRAGRRLWAHLIEKMFQPKNSKSLLLRAHCQTSGWSLTEQDPYNNIVRTAIEAMAAVFGGTQSLHTNSFDEALGLPTVKSARIARNTQIIIQEESGIPKVADPWGGSYMMECLTNDVYDAALKLINEIEEMGGMAKAVAEGIPKLRIEECAARRQARIDSGSEVIVGVNKYQLEKEDAVEVLAIDNTSVRNRQIEKLKKIKSSRDQALAERCLAALTECAASGDGNILALAVDASRARCTVGEITDALKKVFGEHKANDRMVSGAYRQEFGESKEITSAIKRVHKFMEREGRRPRLLVAKMGQDGHDRGAKVIATGFADLGFDVDIGPLFQTPREVAQQAVDADVHAVGISTLAAGHKTLVPELIKELNSLGRPDILVMCGGVIPPQDYEFLFEVGVSNVFGPGTRIPKAAVQVLDDIEKCLEKKQQSVXYPLFVLAFV

SEQ ID NO: 1106 - protein, 682 aa, Homo Sapiens
  misc_feature (663)..(663): Xaa can be any naturally occurring amino acid
MVVSEVDIAKADPAAASHPLLLNGDATVAQKNPGSVAENNLCSQYEEKVRPCIDLIDSLRALGVEQDLALPAIAVIGDQSSGKSSVLEALSGVALPRGSGIVTRCPLVLKLKKLVNEDKWRGKVSYQDYEIEISDASEVEKEINKAQNAIAGEGMGISHELITLEISSRDVPDLTLIDLPGITRVAVGNQPADIGYKIKTLIKKYIQRQETISLVVVPSNVDIATTEALSMAQEVDPEGDRTIGILTKPDLVDKGTEDKVVDVVRNLVFHLKKGYMIVKCRGQQEIQDQLSLSEALQREKIFFENHPYFRDLLEEGKATVPCLAEKLTSELITHICKSLPLLENQIKETHQRITEELQKYGVDIPEDENEKMFFLIDKINAFNQDITALMQGEETVGEEDIRLFTRLRHEFHKWSTIIENNFQEGHKILSRKIQKFENQYRGRELPGFVNYRTFETIVKQQIKALEEPAVDMLHTVTDMVRLAFTDVSIKNFEEFFNLHRTAKSKIEDIRAEQEREGEKLIRLHFQMEQIVYCQDQVYRGALQKVREKELEEEKKKKSWDFGAFQSSSATDSSMEEIFQHLMAYHQEASKRISSHIPLIIQFFMLQTYGQQLQKAMLQLLQDKDTYSWLLKERSDTSDKRKFLKERLARLTQARRRLAQFPGXPHSVQPRRRARTLSAPVPG

SEQ ID NO: 1107 - protein, 1147 aa, Homo Sapiens
  misc_feature (1142)..(1142): Xaa can be any naturally occurring amino acid
MPEPTKKEENEVPAPAPPPEEPSKEKEAGTTPAKDWTLVETPPGEEQAKQNANSQLSILFIEKPQGGTVKVGEDITFIAKVKAEDLLRKPTIKWFKGKWMDLASKAGKHLQLKETFERHSRVYTFEMQIIKAKDNFAGNYRCEVTYKDKFDSCSFDLEVHESTGTTPNIDIRSAFKRSGEGQEDAGELDFSGLLKRREVKQQEEEPQVDVWELLKNAKPSEYEKIAFQYGITDLRGMLKRLKRMRREEKKSAAFAKILDPAYQVDKGGRVRFVVELADPKLEVKWYKNGQEIRPSTKYIFEHKGCQRILFINNCQMTDDSEYYVTAGDEKCSTELFVREPPIMVTKQLEDTTAYCGERVELECEVSEDDANVKWFKNGEEIIPGPKSRYRIRVEGKKHILIIEGATKADAAEYSVMTTGGQSSAKLSVDLKPLKILTPLTDQTVNLGKEICLKCEISENIPGKWTKNGLPVQESDRLKVVHKGRIHKLVIANALTEDEGDYVFAPDAYNVTLPAKVHVIDPPKIILDGLDADNTVTVIAGNKLRLEIPISGEPPPKAMWSRGDKAIMEGSGRIRTESYPDSSTLVIDIAERDDSGVYHINLKNEAGEAHASIKVKVVDFPDPPVAPTVTEVGDDWCIMNWEPPAYDGGSPILGYFIERKKKQSSRWMRLNFDLCKETTFEPKKMIEGVAYEVRIFAVNAIGISKPSMPSRPFVPLAVTSPPTLLTVDSVTDTTVTMRWRPPDHIGAAGLDGYVLEYCFEGSTSAKQSDENGEAAYDLPAEDWIVANKDLIDKTKFTITGLPTDAKIFVRVKAVNAAGASEPKYYSQPILVKEIIEPPKIRIPRHLKQTYIRRVGEAVNLVIPFQGKPRPELTWKKDGAEIDKNQINIRNSETDTIIFIRKAERSHSGKYDLQVKVDKFVETASIDIQIIDRPGPPQIVKIEDVWGENVALTWTPPKDDGNAAITGYTIQKADKKSMEWFTVIEHYHRTSATITELVIGNEYYFRVFSENMCGLSEDATMTKESAVIARDGKIYKNPVYEDFDFSEAPMFTQPLVNTYAIAGYNATLNCSVRGNPKPKITWMKNKVAIVDDPRYRMFSNQGVCTLEIRKPSPYDGGTYCCKAVNDLGTVEIECKLEVKVIAQXGFLNV

SEQ ID NO: 1108 - protein, 1129 aa, Homo Sapiens
  misc_feature (1124)..(1124): Xaa can be any naturally occurring amino acid
MPEPTKKEENEVPAPAPPPEEPSKEKEAGTTPAKDWTLVETPPGEEQAKQNANSQLSILFIEKPQGGTVKVGEDITFIAKVKAEDLLRKPTIKWFKGKWMDLASKAGKHLQLKETFERHSRVYTFEMQIIKAKDNFAGNYRCEVTYKDKFDSCSFDLEVHESTGTTPNIDIRSAFKRSGEGQEDAGELDFSGLLKRREVKQQEEEPQVDVWELLKNAKPSEYEKIAFQYGITDLRGMLKRLKRMRREEKKSAAFAKILDPAYQVDKGGRVRFVVELADPKLEVKWYKNGQEIRPSTKYIFEHKGCQRILFINNCQMTDDSEYYVTAGDEKCSTELFVREPPIMVTKQLEDTTAYCGERVELECEVSEDDANVKWFKNGEEIIPGPKSRYRIRVEGKKHILIIEGATKADAAEYSVMTTGGQSSAKLSVDLKPLKILTPLTDQTVNLGKEICLKCEISENIPGKWTKNGLPVQESDRLKVVHKGRIHKLVIANALTEDEGDYVFAPDAYNVTLPAKVHVIDPPKIILDGLDADNTVTVIAGNKLRLEIPISGEPPPKAMWSRGDKAIMEGSGRIRTESYPDSSTLVIDIAERDDSGVYHINLKNEAGEAHASIKVKVVDFPDPPVAPTVTEVGDDWCIMNWEPPAYDGGSPILGYFIERKKKQSSRWMRLNFDLCKETTFEPKKMIEGVAYEVRIFAVNAIGISKPSMPSRPFVPLAVTSPPTLLTVDSVTDTTVTMRWRPPDHIGAAGLDGYVLEYCFEGTEDWIVANKDLIDKTKFTITGLPTDAKIFVRVKAVNAAGASEPKYYSQPILVKEIIEPPKIRIPRHLKQTYIRRVGEAVNLVIPFQGKPRPELTWKKDGAEIDKNQINIRNSETDTIIFIRKAERSHSGKYDLQVKVDKFVETASIDIQIIDRPGPPQIVKIEDVWGENVALTWTPPKDDGNAAITGYTIQKADKKSMEWFTVIEHYHRTSATITELVIGNEYYFRVFSENMCGLSEDATMTKESAVIARDGKIYKNPVYEDFDFSEAPMFTQPLVNTYAIAGYNATLNCSVRGNPKPKITWMKNKVAIVDDPRYRMFSNQGVCTLEIRKPSPYDGGTYCCKAVNDLGTVEIECKLEVKVIAQXGFLNV

SEQ ID NO: 1109 - protein, 1966 aa, Homo Sapiens
  misc_feature (1936)..(1936): Xaa can be any naturally occurring amino acid
MGDSEMAVFGAAAPYLRKSEKERLEAQTRPFDLKKDVFVPDDKQEFVKAKIVSREGGKVTAETEYGKTVTVKEDQVMQQNPPKFDKIEDMAMLTFLHEPAVLYNLKDRYGSWMIYTYSGLFCVTVNPYKWLPVYTPEVVAAYRGKKRSEAPPHIFSISDNAYQYMLTDRENQSILITGESGAGKTVNTKRVIQYFAVIAAIGDRSKKDQSPGKGTLEDQIIQANPALEAFGNAKTVRNDNSSRFGKFIRIHFGATGKLASADIETYLLEKSRVIFQLKAERDYHIFYQILSNKKPELLDMLLITNNPYDYAFISQGETTVASIDDAEELMATDNAFDVLGFTSEEKNSMYKLTGAIMHFGNMKFKLKQREEQAEPDGTEEADKSAYLMGLNSADLLKGLCHPRVKVGNEYVTKGQNVQQVIYATGALAKAVYERMFNWMVTRINATLETKQPRQYFIGVLDIAGFEIFDFNSFEQLCINFTNEKLQQFFNHHMFVLEQEEYKKEGIEWTFIDFGMDLQACIDLIEKPMGIMSILEEECMFPKATDMTFKAKLFDNHLGKSANFQKPRNIKGKPEAHFSLIHYAGIVDYNIIGWLQKNKDPLNETVVGLYQKSSLKLLSTLFANYAGADAPIEKGKGKAKKGSSFQTVSALHRENLNKLMTNLRSTHPHFVRCIIPNETKSPGVMDNPLVMHQLRCNGVLEGIRICRKGFPNRILYGDFRQRYRILNPAAIPEGQFIDSRKGAEKLLSSLDIDHNQYKFGHTKVFFKAGLLGLLEEMRDERLSRIITRIQAQSRGVLARMEYKKLLERRDSLLVIQWNIRAFMGVKNWPWMKLYFKIKPLLKSAEREKEMASMKEEFTRLKEALEKSEARRKELEEKMVSLLQEKNDLQLQVQAEQDNLADAEERCDQLIKNKIQLEAKVKEMNERLEDEEEMNAELTAKKRKLEDECSELKRDIDDLELTLAKVEKEKHATENKVKNLTEEMAGLDEIIAKLTKEKKALQEAHQQALDDLQAEEDKVNTLTKAKVKLEQQVDDLEGSLEQEKKVRMDLERAKRKLEGDLKLTQESIMDLENDKQQLDERLKKKDFELNALNARIEDEQALGSQLQKKLKELQARIEELEEELEAERTARAKVEKLRSDLSRELEEISERLEEAGGATSVQIEMNKKREAEFQKMRRDLEEATLQHEATAAALRKKHADSVAELGEQIDNLQRVKQKLEKEKSEFKLELDDVTSNMEQIIKAKANLEKMCRTLEDQMNEHRSKAEETQRSVNDLTSQRAKLQTENGELSRQLDEKEALISQLTRGKLTYTQQLEDLKRQLEEEVKAKNALAHALQSARHDCDLLREQYEEETEAKAELQRVLSKANSEVAQWRTKYETDAIQRTEELEEAKKKLAQRLQEAEEAVEAVNAKCSSLEKTKHRLQNEIEDLMVDVERSNAAAAALDKKQRNFDKILAEWKQKYEESQSELESSQKEARSLSTELFKLKNAYEESLEHLETFKRENKNLQEEISDLTEQLGSSGKTIHELEKVRKQLEAEKMELQSALEEAEASLEHEEGKILRAQLEFNQIKAEIERKLAEKDEEMEQAKRNHLRVVDSLQTSLDAETRSRNEALRVKKKMEGDLNEMEIQLSHANRMAAEAQKQVKSLQSLLKDTQIQLDDAVRANDDLKENIAIVERRNNLLQAELEELRAVVEQTERSRKLAEQELIETSERVQLLHSQNTSLINQKKKMDADLSQLQTEVEEAVQECRNAEEKAKKAITDAAMMAEELKKEQDTSAHLERMKKNMEQTIKDLQHRLDEAEQIALKGGKKQLQKLEARVRELENELEAEQKRNAESVKGMRKSERRIKELTYQTEEDRKNLLRLQDLVDKLQLKVKAYKRQAEEAEEQANTNLSKFRKVQHELDEAEERADIAESQVNKLRAKSRDIGTKGLNEEXLCHILICSALEVPAKPHAGACVTAPWEEAE

SEQ ID NO: 1110 - protein, 1967 aa, Homo Sapiens
  misc_feature (1961)..(1961): Xaa can be any naturally occurring amino acid
MAQQAADKYLYVDKNFINNPLAQADWAAKKLVWVPSDKSGFEPASLKEEVGEEAIVELVENGKKVKVNKDDIQKMNPPKFSKVEDMAELTCLNEASVLHNLKERYYSGLIYTYSGLFCVVINPYKNLPIYSEEIVEMYKGKKRHEMPPHIYAITDTAYRSMMQDREDQSILCTGESGAGKTENTKKVIQYLAYVASSHKSKKDQGELERQLLQANPILEAFGNAKTVKNDNSSRFGKFIRINFDVNGYIVGANIETYLLEKSRAIRQAKEERTFHIFYYLLSGAGEHLKTDLLLEPYNKYRFLSNGHVTIPGQQDKDMFQETMEAMRIMGIPEEEQMGLLRVISGVLQLGNIVFKKERNTDQASMPDNTAAQKVSHLLGINVTDFTRGILTPRIKVGRDYVQKAQTKEQADFAIEALAKATYERMFRWLVLRINKALDKTKRQGASFIGILDIAGFEIFDLNSFEQLCINYTNEKLQQLFNHTMFILEQEEYQREGIEWNFIDFGLDLQPCIDLIEKPAGPPGILALLDEECWFPKATDKSFVEKVMQEQGTHPKFQKPKQLKDKADFCIIHYAGKVDYKADEWLMKNMDPLNDNIATLLHQSSDKFVSELWKDVDRIIGLDQVAGMSETALPGAFKTRKGMFRTVGQLYKEQLAKLMATLRNTNPNFVRCIIPNHEKKAGKLDPHLVLDQLRCNGVLEGIRICRQGFPNRVVFQEFRQRYEILTPNSIPKGFMDGKQACVLMIKALELDSNLYRIGQSKVFFRAGVLAHLEEERDLKITDVIIGFQACCRGYLARKAFAKRQQQLTAMKVLQRNCAAYLKLRNWQWWRLFTKVKPLLQVSRQEEEMMAKEEELVKVREKQLAAENRLTEMETLQSQLMAEKLQLQEQLQAETELCAEAEELRARLTAKKQELEEICHDLEARVEEEEERCQHLQAEKKKMQQNIQELEEQLEEEESARQKLQLEKVTTEAKLKKLEEEQIILEDQNCKLAKEKKLLEDRIAEFTTNLTEEEEKSKSLAKLKNKHEAMITDLEERLRREEKQRQELEKTRRKLEGDSTDLSDQIAELQAQIAELKMQLAKKEEELQAALARVEEEAAQKNMALKKIRELESQISELQEDLESERASRNKAEKQKRDLGEELEALKTELEDTLDSTAAQQELRSKREQEVNILKKTLEEEAKTHEAQIQEMRQKHSQAVEELAEQLEQTKRVKANLEKAKQTLENERGELANEVKVLLQGKGDSEHKRKKVEAQLQELQVKFNEGERVRTELADKVTKLQVELDNVTGLLSQSDSKSSKLTKDFSALESQLQDTQELLQEENRQKLSLSTKLKQVEDEKNSFREQLEEEEEAKHNLEKQIATLHAQVADMKKKMEDSVGCLETAEEVKRKLQKDLEGLSQRHEEKVAAYDKLEKTKTRLQQELDDLLVDLDHQRQSACNLEKKQKKFDQLLAEEKTISAKYAEERDRAEAEAREKETKALSLARALEEAMEQKAELERLNKQFRTEMEDLMSSKDDVGKSVHELEKSKRALEQQVEEMKTQLEELEDELQATEDAKLRLEVNLQAMKAQFERDLQGRDEQSEEKKKQLVRQVREMEAELEDERKQRSMAVAARKKLEMDLKDLEAHIDSANKNRDEAIKQLRKLQAQMKDCMRELDDTRASREEILAQAKENEKKLKSMEAEMIQLQEELAAAERAKRQAQQERDELADEIANSSGKGALALEEKRRLEARIAQLEEELEEEQGNTELINDRLKKANLQIDQINTDLNLERSHAQKNENARQQLERQNKELKVKLQEMEGTVKSKYKASITALEAKIAQLEEQLDNETKERQAACKQVRRTEKKLKDVLLQVDDERRNAEQYKDQADKASTRLKQLKRQLEEAEEEAQRANASRRKLQRELEDATETADAMNREVSSLKNKLRRGDLPFVVPRRMARKGAGDGSDEEVDGKADGAEAKPAEXASSPAA

SEQ ID NO: 1111 - protein, 776 aa, Homo Sapiens
  misc_feature (735)..(735): Xaa can be any naturally occurring amino acid
MRPAVLGSPDRAPPEDEGPVMVKLEDSEEEGEAALWDPGPEAARLRFRCFRYEEATGPQEALAQLRELCRQWLRPEVRSKEQMLELLVLEQFLGALPPEIQARVQGQRPGSPEEAAALVDGLRREPGGPRRWVTVQVQGQEVLSEKMEPSSFQPLPETEPPTPEPGPKTPPRTMQESPLGLQVKEESEVTEDSDFLESGPLAATQESVPTLLPEEAQRCGTVLDQIFPHSKTGPEGPSWREHPRALWHEEAGGIFSPGFALQLGSISAGPGSVSPHLHVPWDLGMAGLSGQIQSPSREGGFAHALLLPSDLRSEQDPTDEDPCRGVGPALITTRWRSPRGRSRGRPSTGGGVVRGGRCDVCGKVFSQRSNLLRHQKIHTGERPFVCSECGRSFSRSSHLLRHQLTHTEERPFVCGDCGQGFVRSARLEEHRRVHTGEQPFRCAECGQSFRQRSNLLQHQRIHGDPPGPGAKPPAPPGAPEPPGPFPCSECRESFARRAVLLEHQAVHTGDKSFGCVECGERFGRRSVLLQHRRVHSGERPFACAECGQSFRQRSNLTQHRRIHTGERPFACAECGKAFRQRPTLTQHLRVHTGEKPFACPECGQRFSQRLKLTRHQRTHTGEKPYHCGECGLGFTQVSRLTEHQRIHTGERPFACPECGQSFRQHANLTQHRRIHTGERPYACPECGKAFRQRPTLTQHLRTHRREKPFACQDCGRRFHQSTKLIQHQRVHSAEXLQPGRTVSAMVRTPTSPGYCEAGDYISISRSAQGLATVGVQ

SEQ ID NO: 1112 - protein, 685 aa, Homo Sapiens
  misc_feature (673)..(673): Xaa can be any naturally occurring amino acid
MQNGFSRTLKSGDGITFGVFGSKFRIEYEPLVACSSCLDVSGKTALNQAILQLGGFTVNNWTEECTHLVMVSVKVTIKTICALICGRPIVKPEYFTEFLKAVESKKQPPQIESFYPPLDEPSIGSKNVDLSGRQERKQIFKGKTFIFLNAKQHKKLSSAVVFGGGEARLITEENEEEHNFFLAPGTCVVDTGITNSQTLIPDCQKKWIQSIMDMLQRQGLRPIPEAEIGLAVIFMTTKNYCDPQGHPSTGLKTTTPGPSLSQGVSVDEKLMPSAPVNTTTYVADTESEQADTWDLSERPKEIKVSKMEQKFRMLSQDAPTVKESCKTSSNNNSMVSNTLAKMRIPNYQLSPTKLPSINKSKDRASQQQQTNSIRNYFQPSTKKRERDEENQEMSSCKSARIETSCSLLEQTQPATPSLWKNKEQHLSENEPVDTNSDNNLFTDTDLKSIVKNSASKSHAAEKLRSNKKREMDDVAIEDEVLEQLFKDTKPELEIDVKVQKQEEDVNVRKRPRMDIETNDTFSDEAVPESSKISQENEIGKKRELKEDSLWSAKEISNNDKLQDDSEMLPKKLLLTEFRSLVIKNSTSRNPSGINDDYGQLKNFKKFKKVTYPGAGKLPHIIGGSDLIAHHARKNTELEEWLRQEMEVQNQHAKEESLADDLFRYNPYLKRRRXLRILKRSHGKTS

SEQ ID NO: 1113 - protein, 767 aa, Homo Sapiens
  misc_feature (755)..(755): Xaa can be any naturally occurring amino acid
MWKLLPAAGPAGGEPYRLLTGVEYVVGRKNCAILIENDQSISRNHAVLTANFSVTNLSQTDEIPVLTLKDNSKYGTFVNEEKMQNGFSRTLKSGDGITFGVFGSKFRIEYEPLVACSSCLDVSGKTALNQAILQLGGFTVNNWTEECTHLVMVSVKVTIKTICALICGRPIVKPEYFTEFLKAVESKKQPPQIESFYPPLDEPSIGSKNVDLSGRQERKQIFKGKTFIFLNAKQHKKLSSAVVFGGGEARLITEENEEEHNFFLAPGTCVVDTGITNSQTLIPDCQKKWIQSIMDMLQRQGLRPIPEAEIGLAVIFMTTKNYCDPQGHPSTGLKTTTPGPSLSQGVSVDEKLMPSAPVNTTTYVADTESEQADTWDLSERPKEIKVSKMEQKFRMLSQDAPTVKESCKTSSNNNSMVSNTLAKMRIPNYQLSPTKLPSINKSKDRASQQQQTNSIRNYFQPSTKKRERDEENQEMSSCKSARIETSCSLLEQTQPATPSLWKNKEQHLSENEPVDTNSDNNLFTDTDLKSIVKNSASKSHAAEKLRSNKKREMDDVAIEDEVLEQLFKDTKPELEIDVKVQKQEEDVNVRKRPRMDIETNDTFSDEAVPESSKISQENEIGKKRELKEDSLWSAKEISNNDKLQDDSEMLPKKLLLTEFRSLVIKNSTSRNPSGINDDYGQLKNFKKFKKVTYPGAGKLPHIIGGSDLIAHHARKNTELEEWLRQEMEVQNQHAKEESLADDLFRYNPYLKRRRXLRILKRSHGKTS

SEQ ID NO: 1114 - protein, 972 aa, Homo Sapiens
  misc_feature (967)..(967): Xaa can be any naturally occurring amino acid
MEPQVTLNVTFKNEIQSFLVSDPENTTWADIEAMVKVSFDLNTIQIKYLDEENEEVSINSQGEYEEALKMAVKQGNQLQMQVHEGHHVVDEAPPPVVGAKRLAARAGKKPLAHYSSLVRVLGSDMKTPEDPAVQSFPLVPCDTDQPQDKPPDWFTSYLETFREQVVNETVEKLEQKLHEKLVLQNPSLGSCPSEVSMPTSEETLFLPENQFSWHIACNNCQRRIVGVRYQCSLCPSYNICEDCEAGPYGHDTNHVLLKLRRPVVGSSEPFCHSKYSTPRLPAALEQVRLQKQVDKNFLKAEKQRLRAEKKQRKAEVKELKKQLKLHRKIHLWNSIHGLQSPKSPLGRPESLLQSNTLMLPLQPCTSVMPMLSAAFVDENLPDGTHLQPGTKFIKHWRMKNTGNVKWSADTKLKFMWGNLTLASTEKKDVLVPCLKAGHVGVVSVEFIAPALEGTYTSHWRLSHKGQQFGPRVWCSIIVDPFPSEESPDNIEKGMISSSKTDDLTCQQEETFLLAKEERQLGEVTEQTEGTAACIPQKAKNVASERELYIPSVDLLTAQDLLSFELLDINIVQELERVPHNTPVDVTPCMSPLPHDSPLIEKPGLGQIEEENEGAGFKALPDSMVSVKRKAENIASVEEAEEDLSGTQFVCETVIRSLTLDAAPDHNPPCRQKSLQMTFALPEGPLGNEKEEIIHIAEEEAVMEEEEDEEDEEEEDELKDEVQSQSSASSEDYIIILPECFDTSRPLGDSMYSSALSQPGLERGAEGKPGVEAGQEPAEAGERLPGGENQPQEHSISDILTTSQTLETVPLIPEVVELPPSLPRSSPCVHHHGSPGVDLPVTIPEVSSVPDQIRGEPRGSSGLVNSRQKSYDHSRHHHGSSIAGGLVKGALSVAASAYKALFAGPPVTAQPIISEDQTAALMAHLFEMGFCDRQLNLRLLKKHNYNILQVVTELLQLNNNDWYSQRYXGVTLY

SEQ ID NO: 1115 - protein, 855 aa, Homo Sapiens
  misc_feature (838)..(838): Xaa can be any naturally occurring amino acid
MSLLLSFYLLGLLVSSGQALLQVTISLSKVELSVGESKFFTCTAIGEPESIDWYNPQGEKIISTQRVVVQKEGVRSRLTIYNANIEDAGIYRCQATDAKGQTQEATVVLEIYQKLTFREVVSPQEFKQGEDAEVVCRVSSSPAPAVSWLYHNEEVTTISDNRFAMLANNNLQILNINKSDEGIYRCEGRVEARGEIDFRDIIVIVNVPPAISMPQKSFNATAERGEEMTFSCRASGSPEPAISWFRNGKLIEENEKYILKGSNTELTVRNIINSDGGPYVCRATNKAGEDEKQAFLQVFVQPHIIQLKNETTYENGQVTLVCDAEGEPIPEITWKRAVDGFTFTEGDKSLDGRIEVKGQHGSSSLHIKDVKLSDSGRYDCEAASRIGGHQKSMYLDIEYAPKFISNQTIYYSWEGNPINISCDVKSNPPASIHWRRDKLVLPAKNTTNLKTYSTGRKMILEIAPTSDNDFGRYNCTATNHIGTRFQEYILALADVPSSPYGVKIIELSQTTAKVSFNKPDSHGGVPIHHYQVDVKEVASEIWKIVRSHGVQTMVVLNNLEPNTTYEIRVAAVNGKGQGDYSKIEIFQTLPVREPSPPSIHGQPSSGKSFKLSITKQDDGGAPILEYIVKYRSKDKEDQWLEKKVQGNKDHIILEHLQWTMGYEVQITAANRLGYSEPTVYEFSMPPKPNIIKDTLFNGLGLGAVIGLGVAALLLILVVTDVSCFFIRQCGLLMCITRRMCGKKSGSSGKSKELEEGKAAYLKDGSKEPIVEMRTEDERVTNHEDGSPVNEPNETTPLTEPEKLPLKEEDGKEALNPETIEIKVSNDIIQSKEDDSKAXQQYYRGLNNTTKSIWIA

SEQ ID NO: 1116 - protein, 1512 aa, Homo Sapiens
  misc_feature (1499)..(1499): Xaa can be any naturally occurring amino acid
MVALRGLGSGLQPWCPLDLRLEWVDTVWELDFTETEPLDPSIEAEIIETGLAAFTKLYESLLPFATGEHGSMESIWTFFIENNVSHSTLVALFYHFVQIVHKKNVSVQYREYGLHAAGLYFLLLEVPGSVANQVFHPVMFDKCIQTLKKSWPQESNLNRKRKKEQPKSSQANPGRHRKRGKPPRREDIEMDEIIEEQEDENICFSARDLSQIRNAIFHLLKNFLRLLPKFSLKEKPQCVQNCIEVFVSLTNFEPVLHECHVTQARALNQAKYIPELAYYGLYLLCSPIHGEGDKVISCVFHQMLSVILMLEVGEGSHRAPLAVTSQVINCRNQAVQFISALVDELKESIFPVVRILLQHICAKVVDKSEYRTFAAQSLVQLLSKLPCGEYAMFIAWLYKYSRSSKIPHRVFTLDVVLALLELPEREVDNTLSLEHQKFLKHKFLVQEIMFDRCLDKAPTVRSKALSSFAHCLELTVTSASESILELLINSPTFSVIESHPGTLLRNSSAFSYQRQTSNRSEPSGEINIDSSGETVGSGERCVMAMLRRRIRDEKTNVRKSALQVLVSILKHCDVSGMKEDLWILQDQCRDPAVSVRKQALQSLTELLMAQPRCVQIQKAWLRGVVPVVMDCESTVQEKALEFLDQLLLQNIRHHSHFHSGDDSQVLAWALLTLLTTESQELSRYLNKAFHIWSKKEKFSPTFINNVISHTGTEHSAPAWMLLSKIAGSSPRLDYSRIIQSWEKISSQQNPNSNTLGHILCVIGHIAKHLPKSTRDKVTDAVKCKLNGFQWSLEVISSAVDALQRLCRASAETPAEEQELLTQVCGDVLSTCEHRLSNIVLKENGTGNMDEDLLVKYIFTLGDIAQLCPARVEKRIFLLIQSVLASSADADHSPSSQGSSEAPASQPPPQVRGSVMPSVIRAHAIITLGKLCLQHEDLAKKSIPALVRELEVCEDVAVRNNVIIVMCDLCIRYTIMVDKYIPNISMCLKDSDPFIRKQTLILLTNLLQEEFVKWKGSLFFRFVSTLIDSHPDIASFGEFCLAHLLLKRNPVMFFQHFIECIFHFNNYEKHEKYNKFPQSEREKRLFSLKGKSNKERRMKIYKFLLEHFTDEQRFNITSKICLSILACFADGILPLDLDASELLSDTFEVLSSKEIKLLAMRSKPDKDLLMEEDDMALANVVMQEAQKKLISQVQKRNFIENIIPIIISLKTVLEKNKIPALRELMHYLREVMQDYRDELKDFFAVDKQLASELEYDMKKYQEQLVQEQELAKHADVAGTAGGAEVAPVAQVALCLETVPVPAGQENPAMSPAVSQPCTPRASAGHVAVSSPTPETGPLQRLLPKARPMSLSTIAILNSVKKAVESKSRHRSRSLGVLPFTLNSGSPEKTCSQVSSYSLEQESNGEIEHVTKRAISTPEKSISDVTFGAGVSYIGTPRTPSSAKEKIEGRSQGNDILCLSLPDKPPPQPQQWNVRSPARNKDTPACSRRSLRKTPLKTANXTAPPTSVQAGRSP

SEQ ID NO: 1117 - protein, 731 aa, Homo Sapiens
  misc_feature (728)..(728): Xaa can be any naturally occurring amino acid
MLRIPVRKALVGLSKSPKGCVRTTATAASNLIEVFVDGQSVMVEPGTTVLQACEKVGMQIPRFCYHERLSVAGNCRMCLVEIEKAPKVVAACAMPVMKGWNILTNSEKSKKAREGVMEFLLANHPLDCPICDQGGECDLQDQSMMFGNDRSRFLEGKRAVEDKNIGPLVKTIMTRCIQCTRCIRFASEIAGVDDLGTTGRGNDMQVGTYIEKMFMSELSGNIIDICPVGALTSKPYAFTARPWETRKTESIDVMDAVGSNIVVSTRTGEVMRILPRMHEDINEEWISDKTRFAYDGLKRQRLTEPMVRNEKGLLTYTSWEDALSRVAGMLQSFQGKDVAAIAGGLVDAEALVALKDLLNRVDSDTLCTEEVFPTAGAGTDLRSNYLLNTTIAGVEEADVVLLVGTNPRFEAPLFNARIRKSWLHNDLKVALIGSPVDLTYTYDHLGDSPKILQDIASGSHPFSQVLKEAKKPMVVLGSSALQRNDGAAILAAVSSIAQKIRMTSGVTGDWKVMNILHRIASQVAALDLGYKPGVEAIRKNPPKVLFLLGADGGCITRQDLPKDCFIIYQGHHGDVGAPIADVILPGAAYTEKSATYVNTEGRAQQTKVAVTPPGLAREDWKIIRALSEIAGMTLPYDTLDQVRNRLEEVSPNLVRYDDIEGANYFQQANELSKLVNQQLLADPLVPPQLTIKDFYMTDSISRASQTMAKCVKAVTEGAQAVEEPSICXSFY

SEQ ID NO: 1118 - protein, 577 aa, Homo Sapiens
  misc_feature (544)..(544): Xaa can be any naturally occurring amino acid
MSSFSYEPYYSTSYKRRYVETPRVHISSVRSGYSTARSAYSSYSAPVSSSLSVRRSYSSSSGSLMPSLENLDLSQVAAISNDLKSIRTQEKAQLQDLNDRFASFIERVHELEQQNKVLEAELLVLRQKHSEPSRFRALYEQEIRDLRLAAEDATNEKQALQGEREGLEETLRNLQARYEEEVLSREDAEGRLMEARKGADEAALARAELEKRIDSLMDEISFLKKVHEEEIAELQAQIQYAQISVEMDVTKPDLSAALKDIRAQYEKLAAKNMQNAEEWFKSRFTVLTESAAKNTDAVRAAKDEVSESRRLLKAKTLEIEACRGMNEALEKQLQELEDKQNADISAMQDTINKLENELRTTKSEMARYLKEYQDLLNVKMALDIEIAAYRKLLEGEETRLSFTSVGSITSGYSQSSQVFGRSAYGGLQTSSYLMSTRSFPSYYTSHVQEEQIEVEETIEAAKAEEAKDEPPSEGEAEEEEKDKEEAEEEEAAEEEEAAKEESEEAKEEEEGGEGEEGEETKEAEEEEKKVEGAGEEQAAKKKDXTPISLIISGIILPKSGQPHHQPTNQLSSRFYVN

SEQ ID NO: 1119 - protein, 824 aa, Homo Sapiens
  misc_feature (811)..(811): Xaa can be any naturally occurring amino acid
MPMDLILVVWFCVCTARTVVGFGMDPDLQMDIVTELDLVNTTLGVAQVSGMHNASKAFLFQDIEREIHAAPHVSEKLIQLFQNKSEFTILATVQQKPSTSGVILSIRELEHSYFELESSGLRDEIRYHYIHNGKPRTEALPYRMADGQWHKVALSVSASHLLLHVDCNRIYERVIDPPDTNLPPGINLWLGQRNQKHGLFKGIIQDGKIIFMPNGYITQCPNLNHTCPTCSDFLSLVQGIMDLQELLAKMTAKLNYAETRLSQLENCHCEKTCQVSGLLYRDQDSWVDGDHCRNCTCKSGAVECRRMSCPPLNCSPDSLPVHIAGQCCKVCRPKCIYGGKVLAEGQRILTKSCRECRGGVLVKITEMCPPLNCSEKDHILPENQCCRVCRGHNFCAEGPKCGENSECKNWNTKATCECKSGYISVQGDSAYCEDIDECAAKMHYCHANTVCVNLPGLYRCDCVPGYIRVDDFSCTEHDECGSGQHNCDENAICTNTVQGHSCTCKPGYVGNGTICRAFCEEGCRYGGTCVAPNKCVCPSGFTGSHCEKDIDECSEGIIECHNHSRCVNLPGWYHCECRSGFHDDGTYSLSGESCIDIDECALRTHTCWNDSACINLAGGFDCLCPSGPSCSGDCPHEGGLKHNGQVWTLKEDRCSVCSCKDGKIFCRRTACDCQNPSADLFCCPECDTRVTSQCLDQNGHKLYRSGDNWTHSCQQCRCLEGEVDCWPLTCPNLSCEYTAILEGECCPRCVSDPCLADNITYDIRKTCLDSYGVSRLSGSVWTMAGSPCTTCKCKNGRVCCSVDFECLQNNXSIYSGLNAEEWTK

SEQ ID NO: 1120 - protein, 1632 aa, Homo Sapiens
  misc_feature (1622)..(1622): Xaa can be any naturally occurring amino acid
MEGCMGEESFQMWELNRRLEAYLARVKALEEQNELLSAELGGLRAQSADTSWRAHADDELAALRALVDQRWREKHAAEVARDNLAEELEGVAGRCQQLRLARERTTEEVARNRRAVEAEKCARAWLSSQVAELERELEALRVAHEEERVGLNAQAACAPRCPAPPRGPPAPAPEVEELARRLGEAWRGAVRGYQERVAHMETSLGQARERLGRAVQGAREGRLELQQLQAERGGLLERRAALEQRLEGRWQERLRATEKFQLAVEALEQEKQGLQSQIAQVLEGRQQLAHLKMSLSLEVATYRTLLEAENSRLQTPGGGSKTSLSFQDPKLELQFPRTPEGRRLGSLLPVLSPTSLPSPLPATLETPVPAFLKNQEFLQARTPTLASTPIPPTPQAPSPAVDAEIRAQDAPLSLLQTQGGRKQAPEPLRAEARVAIPASVLPGPEEPGGQRQEASTGQSPEDHASLAPPLSPDHSSLEAKDGESGGSRVFSICRGEGEGQIWGLVEKETAIEGKVVSSLQQEIWEEEDLNRKEIQDSQVPLEKETLKSLGEEIQESLKTLENQSHETLERENQECPRSLEEDLETLKSLEKENKELLKDVEVVRPLEKEAVGQLKPTGKEDTQTLQSLQKENQELMKSLEGNLETFLFPGTENQELVSSLQENLESLTALEKENQEPLRSPEVGDEEALRPLTKENQEPLRSLEDENKEAFRSLEKENQEPLKTLEEEDQSIVRPLETENHKSLRSLEEQDQETLRTLEKETQQRRRSLGEQDQMTLRPPEKVDLEPLKSLDQEIARPLENENQEFLKSLKEESVEAVKSLETEILESLKSAGQENLETLKSPETQAPLWTPEEINQGAMNPLEKEIQEPLESVEVNQETFRLLEEENQESLRSLGAWNLENLRSPEEVDKESQRNLEEEENLGKGEYQESLRSLEEEGQELPQSADVQRWEDTVEKDQELAQESPPGMAGVENEDEAELNLREQDGFTGKEEVVEQGELNATEEVWIPGEGHPESPEPKEQRGLVEGASVKGGAEGLQDPEGQSQQVGAPGLQAPQGLPEAIEPLVEDDVAPGGDQASPEVMLGSEPAMGESAAGAEPGPGQGVGGLGDPGHLTREEVMEPPLEEESLEAKRVQGLEGPRKDLEEAGGLGTEFSELPGKSRDPWEPPREGREESEAEAPRGAEEAFPAETLGHTGSDAPSPWPLGSEEAEEDVPPVLVSPSPTYTPILEDAPGPQPQAEGSQEASWGVQGRAEALGKVESEQEELGSGEIPEGPQEEGEESREESEEDELGETLPDSTPLGFYLRSPTSPRWDPTGEQRPPPQGETGKEGWDPAVLASEGLEAPPSEKEEGEEGEEECGRDSDLSEEFEDLGTEAPFLPGVPGEVAEPLGQVPQLLLDPAAWDRDGESDGFADEEESGEEGEEDQEEGREPGAGRWGPGSSVGSLQALSSSQRGEFLESDSVSVSVPWDDSLRGAVAGAPKTALETESQDSAEPSGSEEESDPVSLEREDKVPGPLEIPSGMEDAGPGADIIGVNGQGPNLEGKSQHVNGGVMNGLEQSEEVGQGMPLVSEGDRGSPFQEEEGSALKTSWAGAPVHLGQGQFLKFTQREGDRESWSSGEDXEKTICPALGT

SEQ ID NO: 1121 - protein, 1107 aa, Homo Sapiens
  misc_feature (1087)..(1087): Xaa can be any naturally occurring amino acid
MANLLKTVVTGCSCPLLSNLGSCKGLRVKKDFLRTFYTHQELWCKAPVKPGIPYKQLTVGVPKEIFQNEKRVALSPAGVQNLVKQGFNVVVESGAGEASKFSDDHYRVAGAQIQGAKEVLASDLVVKVRAPMVNPTLGVHEADLLKTSGTLISFIYPAQNPELLNKLSQRKTTVLAMDQVPRVTIAQGYDALSSMANIAGYKAVVLAANHFGRFFTGQITAAGKVPPAKILIVGGGVAGLASAGAAKSMGAIVRGFDTRAAALEQFKSLGAEPLEVDLKESGEGQGGYAKEMSKEFIEAEMKLFAQQCKEVDILISTALIPGKKAPVLFNKEMIESMKEGSVVVDLAAEAGGNFETTKPGELYIHKGITHIGYTDLPSRMATQASTLYSNNITKLLKAISPDKDNFYFDVKDDFDFGTMGHVIRGTVVMKDGKVIFPAPTPKNIPQGAPVKQKTVAELEAEKAATITPFRKTMSTASAYTAGLTGILGLGIAAPNLAFSQMVTTFGLAGIVGYHTVWGVTPALHSPLMSVTNAISGLTAVGGLALMGGHLYPSTTSQGLAALAAFISSVNIAGGFLVTQRMLDMFKRPTDPPEYNYLYLLPAGTFVGGYLAALYSGYNIEQIMYLGSGLCCVGALAGLSTQGTARLGNALGMIGVAGGLAATLGVLKPGPELLAQMSGAMALGGTIGLTIAKRIQISDLPQLVAAFHSLVGLAAVLTCIAEYIIEYPHFATDAAANLTKIVAYLGTYIGGVTFSGSLIAYGKLQGLLKSAPLLLPGRHLLNAGLLAASVGGIIPFMVDPSFTTGITCLGSVSALSAVMGVTLTAAIGGADMPVVITVLNSYSGWALCAEGFLLNNNLLTIVGALIGSSGAILSYIMCVAMNRSLANVILGGYGTTSTAGGKPMEISGTHTEINLDNAIDMIREANSIIITPGYGLCAAKAQYPIADLVKMLTEQGKKVRFGIHPVAGRMPGQLNVLLAEAGVPYDIVLEMDEINHDFPDTDLVLVIGANDTVNSAAQEDPNSIIAGMPVLEVWKSKQVIVMKRSLGVGYAAVDNPIFYKPNTAMLLGDAKKTCDALQAKVRESYQKXILRIKLLANNATSAVLGTGK

SEQ ID NO: 1122 - protein, 1282 aa, Homo Sapiens
  misc_feature (1223)..(1223): Xaa can be any naturally occurring amino acid
MLVGQGAGPLGPAVVTAAVVLLLSGVGPAHGSEDIVVGCGGFVKSDVEINYSLIEIKLYTKHGTLKYQTDCAPNNGYFMIPLYDKGDFILKIEPPLGWSFEPTTVELHVDGVSDICTKGGDINFVFTGFSVNGKVLSKGQPLGPAGVQVSLRNTGTEAKIQSTVTQPGGKFAFFKVLPGDYEILATHPTWALKEASTTVRVTNSNANAASPLIVAGYNVSGSVRSDGEPMKGVKFLLFSSLVTKEDVLGCNVSPVPGFQPQDESLVYLCYTVSREDGSFSFYSLPSGGYTVIPFYRGERITFDVAPSRLDFTVEHDSLKIEPVFHVMGFSVTGRVLNGPEGDGVPEAVVTLNNQIKVKTKADGSFRLENITTGTYTIHAQKEHLYFETVTIKIAPNTPQLADIIATGFSVCGQISIIRFPDTVKQMNKYKVVLSSQDKDKSLVTVETDAHGSFCFKAKPGTYKVQVMVPEAETRAGLTLKPQTFPLTVTNRPMMDVAFVQFLASVSGKVSCLDTCGDLLVTLQSLSRQGEKRSLQLSGKVNAMTFTFDNVLPGKYKISIMHEDWCWKNKSLEVEVLEDDMSAVEFRQTGYMLRCSLSHAITLEFYQDGNGRENVGIYNLSKGVNRFCLSKPGVYKVTPRSCHRFEQAFYTYDTSSPSILTLTAIRHHVLGTITTDKMMDVTVTIKSSIDSEPALVLGPLKSVQELRREQQLAEIEARRQEREKNGNEEGEERMTKPPVQEMVDELQGPFSYDFSYWARSGEKITVTPSSKELLFYPPSMEAVVSGESCPGKLIEIHGKAGLFLEGQIHPELEGVEIVISEKGASSPLITVFTDDKGAYSVGPLHSDLEYTVTSQKEGYVLTAVEGTIGDFKAYALAGVSFEIKAEDDQPLPGVLLSLSGGLFRSNLLTQDNGILTFSNLSPGQYYFKPMMKEFRFEPSSQMIEVQEGQNLKITITGYRTAYSCYGTVSSLNGEPEQGVAMEAVGQNDCSIYGEDTVTDEEGKFRLRGLLPGCVYHVQLKAEGNDHIERALPHHRVIEVGNNDIDDVNIIVFRQINQFDLSGNVITSSEYLPTLWVKLYKSENLDNPIQTVSLGQSLFFHFPPLLRDGENYVVLLDSTLPRSQYDYILPQVSFTAVGYHKHITLIFNPTRKLPEQDIAQGSYIALPLTLLVLLAGYNHDKLIPLLLQLTSRLQGVRALGQAASDNSGPEDAKRQAKKQKTRRTXGGRGQLQSHLGQATARGPATTRPWDKSQKHASANFSLCCWARTPCPLSLWHPAPILTPP

SEQ ID NO: 1123 - protein, 145 aa, Homo Sapiens
  misc_feature (135)..(135): Xaa can be any naturally occurring amino acid
MDPQTAPSRALLLLLFLHLAFLGGRSHPLGSPGSASDLETSGLQEQRNHLQGKLSELQVEQTSLEPLQESPRPTGVWKSREVATEGIRGHRKMVLYTLRAPRSPKMVQGSGCFGRKMDRISSSSGLGCKVLRRHXEEVLAADTCF

SEQ ID NO: 1124 - protein, 117 aa, Homo Sapiens
  misc_feature (98)..(98): Xaa can be any naturally occurring amino acid
MLGNKRLGLSGLTLALSLLVCLGALAEAYPSKPDNPGEDAPAEDMARYYSALRHYINLITRQRYGKRSSPETLISDLLMRESTENVPRTRLEDPAMWXWEMRLALWPFPIFSPYFIV

SEQ ID NO: 1125 - protein, 602 aa, Homo Sapiens
  misc_feature (562)..(562): Xaa can be any naturally occurring amino acid
MSTSWSDRLQNAADMPANMDKHALKKYRREAYHRVFVNRSLAMEKIKCFGFDMDYTLAVYKSPEYESLGFELTVERLVSIGYPQELLSFAYDSTFPTRGLVFDTLYGNLLKVDAYGNLLVCAHGFNFIRGPETREQYPNKFIQRDDTERFYILNTLFNLPETYLLACLVDFFTNCPRYTSCETGFKDGDLFMSYRSMFQDVRDAVDWVHYKGSLKEKTVENLEKYVVKDGKLPLLLSRMKEVGKVFLATNSDYKYTDKIMTYLFDFPHGPKPGSSHRPWQSYFDLILVDARKPLFFGEGTVLRQVDTKTGKLKIGTYTGPLQHGIVYSGGSSDTICDLLGAKGKDILYIGDHIFGDILKSKKRQGWRTFLVIPELAQELHVWTDKSSLFEELQSLDIFLAELYKHLDSSSNERPDISSIQRRIKKVTHDMDMCYGMMGSLFRSGSRQTLFASQVMRYADLYAASFINLLYYPFSYLFRAAHVLMPHESTVEHTHVDINEMESPLATRNRTSVDFKDTDYKRHQLTRSISEIKPPNLFPLAPQEITHCHDEDDDEEEEEEEEXGGKPKPQAPIKQVLAGLTGTNEVPVRVLLGGGRGLHERYV

SEQ ID NO: 1126 - protein, 697 aa, Homo Sapiens
  misc_feature (688)..(688): Xaa can be any naturally occurring amino acid
MGNGESQLSSVPAQKLGWFIQEYLKPYEECQTLIDEMVNTICDVLQEPEQFPLVQGVAIGGSYGRKTVLRGNSDGTLVLFFSDLKQFQDQKRSQRDILDKTGDKLKFCLFTKWLKNNFEIQKSLDGFTIQVFTKNQRISFEVLAAFNALSLNDNPSPWIYRELKRSLDKTNASPGEFAVCFTELQQKFFDNRPGKLKDLILLIKHWHQQCQKKIKDLPSLSPYALELLTVYAWEQGCRKDNFDIAEGVRTVLELIKCQEKLCIYWMVNYNFEDETIRNILLHQLQSARPVILDPVDPTNNVSGDKICWQWLKKEAQTWLTSPNLDNELPAPSWNVLPAPLFTTPGHLLDKFIKEFLQPNKCFLEQIDSAVNIIRTFLKENCFRQSTAKIQIVRGGSTAKGTALKTGSDADLVVFHNSLKSYTSQKNERHKIVKEIHEQLKAFWREKEEELEVSFEPPKWKAPRVLSFSLKSKVLNESVSFDVLPAFNALGQLSSGSTPSPEVYAGLIDLYKSSDLPGGEFSTCFTVLQRNFIRSRPTKLKDLIRLVKHWYKECERKLKPKGSLPPKYALELLTIYAWEQGSGVPDFDTAEGFRTVLELVTQYQQLCIFWKVNYNFEDETVRKFLLSQLQKTRPVILDPAEPTGDVGGGDRWCWHLLAKEAKEWLSSPCFKDGTGNPIPPWKVPVKVIXRRRCLEIAL

SEQ ID NO: 1127 - protein, 727 aa, Homo Sapiens
  misc_feature (720)..(720): Xaa can be any naturally occurring amino acid
MGNGESQLSSVPAQKLGWFIQEYLKPYEECQTLIDEMVNTICDVLQEPEQFPLVQGVAIGGSYGRKTVLRGNSDGTLVLFFSDLKQFQDQKRSQRDILDKTGDKLKFCLFTKWLKNNFEIQKSLDGFTIQVFTKNQRISFEVLAAFNALSLNDNPSPWIYRELKRSLDKTNASPGEFAVCFTELQQKFFDNRPGKLKDLILLIKHWHQQCQKKIKDLPSLSPYALELLTVYAWEQGCRKDNFDIAEGVRTVLELIKCQEKLCIYWMVNYNFEDETIRNILLHQLQSARPVILDPVDPTNNVSGDKICWQWLKKEAQTWLTSPNLDNELPAPSWNVLPAPLFTTPGHLLDKFIKEFLQPNKCFLEQIDSAVNIIRTFLKENCFRQSTAKIQIVRGGSTAKGTALKTGSDADLVVFHNSLKSYTSQKNERHKIVKEIHEQLKAFWREKEEELEVSFEPPKWKAPRVLSFSLKSKVLNESVSFDVLPAFNALGQLSSGSTPSPEVYAGLIDLYKSSDLPGGEFSTCFTVLQRNFIRSRPTKLKDLIRLVKHWYKECERKLKPKGSLPPKYALELLTIYAWEQGSGVPDFDTAEGFRTVLELVTQYQQLCIFWKVNYNFEDETVRKFLLSQLQKTRPVILDPAEPTGDVGGGDRWCWHLLAKEAKEWLSSPCFKDGTGNPIPPWKVPTMQTPGSCGARIHPIVNEMFSSRSHRILNNNSKRNFXRSSGNRF

SEQ ID NO: 1128 - protein, 1020 aa, Homo Sapiens
  misc_feature (1013)..(1013): Xaa can be any naturally occurring amino acid
MMAQSNMFTVADVLSQDELRKKLYQTFKDRGILDTLKTQLRNQLIHELMHPVLSGELQPRSISVEGSSLLIGASNSLVADHLQRCGYEYSLSVFFPESGLAKEKVFTMQDLLQLIKINPTSSLYKSLVSGSDKENQKGFLMHFLKELAEYHQAKESCNMETQTSSTFNRDSLAEKLQLIDDQFADAYPQRIKFESLEIKLNEYKREIEEQLRAEMCQKLKFFKDTEIAKIKMEAKKKYEKELTMFQNDFEKACQAKSEALVLREKSTLERIHKHQEIETKEIYAQRQLLLKDMDLLRGREAELKQRVEAFELNQKLQEEKHKSITEALRRQEQNIKSFEETYDRKLKNELLKYQLELKDDYIIRTNRLIEDERKNKEKAVHLQEELIAINSKKEELNQSVNRVKELELELESVKAQSLAITKQNHMLNEKVKEMSDYSLLKEEKLELLAQNKLLKQQLEESRNENLRLLNRLAQPAPELAVFQKELRKAEKAIVVEHEEFESCRQALHKQLQDEIEHSAQLKAQILGYKASVKSLTTQVADLKLQLKQTQTALENEVYCNPKQSVIDRSVNGLINGNVVPCNGEISGDFLNNPFKQENVLARMVASRITNYPTAWVEGSSPDSDLEFVANTKARVKELQQEAERLEKAFRSYHRRVIKNSAKSPLAAKSPPSLHLLEAFKNITSSSPERHIFGEDRVVSEQPQVGTLEERNDVVEALTGSAASRLRGGTSSRRLSSTPLPKAKRSLESEMYLEGLGRSHIASPSPCPDRMPLPSPTESRHSLSIPPVSSPPEQKVGLYRRQTELQDKSEFSDVDKLAFKDNEEFESSFESAGNMPRQLEMGGLSPAGDMSHVDAAAAAVPLSYQHPSVDQKQIEEQKEEEKIREQQVKERRQREERRQSNLQEVLERERRELEKLYQERKMIEESLKIKIKKELEMENELEMSNQEIKDKSAHSENPLEKYMKIIQQEQDQESADKSSKKMVQEGSLVDTLQSSDKVESLTGFSHEELDDSWXPCLLPSF

SEQ ID NO: 1129 - protein, 550 aa, Homo Sapiens
  misc_feature (535)..(535): Xaa can be any naturally occurring amino acid
MIWYILIIGILLPQSLAHPGFFTSIGQMTDLIHTEKDLVTSLKDYIKAEEDKLEQIKKWAEKLDRLTSTATKDPEGFVGHPVNAFKLMKRLNTEWSELENLVLKDMSDGFISNLTIQRQYFPNDEDQVGAAKALLRLQDTYNLDTDTISKGNLPGVKHKSFLTAEDCFELGKVAYTEADYYHTELWMEQALRQLDEGEISTIDKVSVLDYLSYAVYQQGDLDKALLLTKKLLELDPEHQRANGNLKYFEYIMAKEKDVNKSASDDQSDQKTTPKKKGVAVDYLPERQKYEMLCRGEGIKMTPRRQKKLFCRYHDGNRNPKFILAPAKQEDEWDKPRIIRFHDIISDAEIEIVKDLAKPRLSRATVHDPETGKLTTAQYRVSKSAWLSGYENPVVSRINMRIQDLTGLDVSTAEELQVANYGVGGQYEPHFDFARKDEPDAFKELGTGNRIATWLFYMSDVSAGGATVFPEVGASVWPKKGTAVFWYNLFASGEGDYSTRHAACPVLVGNKWVSNKWLHERGQEFRRPCTLSELEXQTGFPFSPIVVLLCV

SEQ ID NO: 1130 - protein, 550 aa, Homo Sapiens
  misc_feature (535)..(535): Xaa can be any naturally occurring amino acid
MIWYILIIGILLPQSLAHPGFFTSIGQMTDLIHTEKDLVTSLKDYIKAEEDKLEQIKKWAEKLDRLTSTATKDPEGFVGHPVNAFKLMKRLNTEWSELENLVLKDMSDGFISNLTIQRQYFPNDEDQVGAAKALLRLQDTYNLDTDTISKGNLPGVKHKSFLTAEDCFELGKVAYTEADYYHTELWMEQALRQLDEGEISTIDKVSVLDYLSYAVYQQGDLDKALLLTKKLLELDPEHQRANGNLKYFEYIMAKEKDVNKSASDDQSDQKTTPKKKGVAVDYLPERQKYEMLCRGEGIKMTPRRQKKLFCRYHDGNRNPKFILAPAKQEDEWDKPRIIRFHDIISDAEIEIVKDLAKPRLRRATISNPITGDLETVHYRISKSAWLSGYENPVVSRINMRIQDLTGLDVSTAEELQVANYGVGGQYEPHFDFARKDEPDAFKELGTGNRIATWLFYMSDVSAGGATVFPEVGASVWPKKGTAVFWYNLFASGEGDYSTRHAACPVLVGNKWVSNKWLHERGQEFRRPCTLSELEXQTGFPFSPIVVLLCV

SEQ ID NO: 1131 - protein, 551 aa, Homo Sapiens
  misc_feature (509)..(509): Xaa can be any naturally occurring amino acid
MLRRALLCLAVAALVRADAPEEEDHVLVLRKSNFAEALAAHKYLLVEFYAPWCGHCKALAPEYAKAAGKLKAEGSEIRLAKVDATEESDLAQQYGVRGYPTIKFFRNGDTASPKEYTAGREADDIVNWLKKRTGPAATTLPDGAAAESLVESSEVAVIGFFKDVESDSAKQFLQAAEAIDDIPFGITSNSDVFSKYQLDKDGVVLFKKFDEGRNNFEGEVTKENLLDFIKHNQLPLVIEFTEQTAPKIFGGEIKTHILLFLPKSVSDYDGKLSNFKTAAESFKGKILFIFIDSDHTDNQRILEFFGLKKEECPAVRLITLEEEMTKYKPESEELTAERITEFCHRFLEGKIKPHLMSQELPEDWDKQPVKVLVGKNFEDVAFDEKKNVFVEFYAPWCGHCKQLAPIWDKLGETYKDHENIVIAKMDSTANEVEAVKVHSFPTLKFFPASADRTVIDYNGERTLDGFKKFLESGGQDGAGDDDDLEDLEEAEEPDMEEDDDQKAVKDELXYAKPDPGAAETPRGLHTQQQRTPPKPAASLEGGRRRKPREPL

SEQ ID NO: 1132 - protein, 249 aa, Homo Sapiens
  misc_feature (181)..(181): Xaa can be any naturally occurring amino acid
MLCLLLTLGVALVCGVPAMDIPQTKQDLELPKLAGTWHSMAMATNNISLMATLKAPLRVHITSLLPTPEDNLEIVLHRWENNSCVEKKVLGEKTENPKKFKINYTVANEATLLDTDYDNFLFLCLQDTTTPIQSMMCQYLARVLVEDDEIMQGFIRAFRPLPRHLWYLLDLKQMEEPCRFXLTSASRKTRLPPFHTSRAVGLPPALSKNNHSSEDDDVVICVAIPFLLHTCTTAMGRLLPGGRVSGRGY

SEQ ID NO: 1133 - protein, 438 aa, Homo Sapiens
  misc_feature (411)..(411): Xaa can be any naturally occurring amino acid
MVLSQRQRDELNRAIADYLRSNGYEEAYSVFKKEAELDVNEELDKKYAGLLEKKWTSVIRLQKKVMELESKLNEAKEEFTSGGPLGQKRDPKEWIPRPPEKYALSGHRSPVTRVIFHPVFSVMVSASEDATIKVWDYETGDFERTLKGHTDSVQDISFDHSGKLLASCSADMTIKLWDFQGFECIRTMHGHDHNVSSVAIMPNGDHIVSASRDKTIKMWEVQTGYCVKTFTGHREWVRMVRPNQDGTLIASCSNDQTVRVWVVATKECKAELREHEHVVECISWAPESSYSSISEATGSETKKSGKPGPFLLSGSRDKTIKMWDVSTGMCLMTLVGHDNWVRGVLFHSGGKFILSCADDKTLRVWDYKNKRCMKTLNAHEHFVTSLDFHKTAPYVVTGSVDQTVKVWECRXLCLLRPLLPLFLWMHSDDTMVTPLSSV

SEQ ID NO: 1134 - protein, 203 aa, Homo Sapiens
  misc_feature (190)..(190): Xaa can be any naturally occurring amino acid
MASKRALVILAKGAEEMETVIPVDVMRRAGIKVTVAGLAGKDPVQCSRDVVICPDASLEDAKKEGPYDVVVLPGGNLGAQNLSESAAVKEILKEQENRKGLIAAICAGPTALLAHEIGFGSKVTTHPLAKDKMMNGGHYTYSENRVEKDGLILTSRGPGTSFEFALAIVEALNGKEVAAQVKAPLVLKDXSSELRRSLRETGR

SEQ ID NO: 1135 - protein, 619 aa, Homo Sapiens
  misc_feature (431)..(431): Xaa can be any naturally occurring amino acid
MDERLLGPPPPGGGRGGLGLVSGEPGGPGEPPGGGDPGGGSGGVPGGRGKQDIGDILQQIMTITDQSLDEAQAKKHALNCHRMKPALFSVLCEIKEKTGLSIRSSQEEEPVDPQLMRLDNMLLAEGVAGPEKGGGSAAAAAAAAASGGGVSPDNSIEHSDYRSKLAQIRHIYHSELEKYEQACNEFTTHVMNLLREQSRTRPVAPKEMERMVSIIHRKFSAIQMQLKQSTCEAVMILRSRFLDARRKRRNFSKQATEVLNEYFYSHLSNPYPSEEAKEELAKKCGITVSQVSNWFGNKRIRYKKNIGKFQEEANIYAVKTAVSVTQGGHSRTSSPTPPSSAGSGGSFNLSGSGDMFLGMPGLNGDSYSASQVESLRHSMGPGGYGDNLGGGQMYSPREMRANGSWQEAVTPSSVTSPTEGPGSVHSDTSNXSCPSGSQGWGLSQGDLKRTQASRGQTPIQEKHKTEKGQWGHPLPNETLCAGGANYMAGRMGPLRGVWGLSLPFFHLFPLSLSFLHRNIHIPRNLFLRPLFLLCLSLSLSHTSHTHTPTCNYSVSLLGSPTFPSPPHLYALESVETPALPNQRCQKWGHDFWTEDMGHAPMHPHPRPSGRLTYLIRSSS

SEQ ID NO: 1136 - protein, 1002 aa, Homo Sapiens
  misc_feature (950)..(950): Xaa can be any naturally occurring amino acid
MFGFQRRGLGTPRLQLWLLLLEFWEVGSGQLHYSVSEEAKHGTFVGRIAQDLGLELAELVQRLFRVASKTHGDLLEVNLQNGILFVNSRIDREELCGQSAECSIHLEVIVDRPLQVFHVNVEVKDINDNPPVFSLREQKLLIAESKQSDSRFPLEGASDADIEENALLTYRLSKNEYFSLDSPTNGKQIKRLSLILKKSLDREKTPELNLLLTATDGGKPELTGTVRLLVQVLDVNDNDPEFDKSEYKVSLMENAAKETLVLKLNATDRDEGVNGEVTYSLMSIKPNGRHLFTLDQNNGEVRVNGTLDYEENKFYKIEVQATDKGTPPMAGHCTVWVEILDTNDNSPEVAVTSLSLPVREDAQPSTVIALISVSDRDSGVNGQVTCSLTPHVPFKLVSTFKNYYSLVLDSALDRENVWAYELVVTARDGGSPSLWATARVSVEVADVNDNAPAFAQPEYTVFVKENNPPGCHIFTVSARDADAQENALVSYSLVERRLGDRALSSYVSVHAESGKVYALQPLDHEELELLQFQVSARDAGVPPLSSNVTLQVFVLDENDNAPALLATQAGSAGGAVNKLVPRSVGAGHVVAKVRAVDADSGYNAWLSYELQPAAGGSRIPFRVGLYTGEISTTRALDEADSPRHRLLVLVKDHGEPALTATATVLVSLVESGQAPKASSRTLAGAASPEAALVDVNVYLIIAICVVSSLLVLTLLLYTALWWSATPTEGACAPGKPTLVCSRAVGSWSYSQQRRQRVCSEEGPPKTDLMAFSPSLPLGLNKEEEGERQEPGSNHPGQPRQPNPDWRYSASLRAGMHSSVHLEEAGILRAGPGGPDQQWPTVSSATPEPEAGEVSPPVGAGVNSNSWTFKYGPGNPKQSGPGELPDKFIIPGSPAIISIRQEPTNSQIDKSDFITFGKKEETKKKKKKKKGNKTQEKKEKGNSTTDNSDQXGPQMETSHLASFCNNGKSLPCSNSLLLFPIYMSPLRDLRNLQKVPCVCLERI

SEQ ID NO: 1137 - protein, 2042 aa, Homo Sapiens
  misc_feature (2025)..(2025): Xaa can be any naturally occurring amino acid
MATGGGPFEDGMNDQDLPNWSNENVDDRLNNMDWGAQQKKANRSSEKNKKKFGVESDKRVTNDISPESSPGVGRRRTKTPHTFPHSRYMSQMSVPEQAELEKLKQRINFSDLDQRSIGSDSQGRATAANNKRQLSENRKPFNFLPMQINTNKSKDASTSPPNRETIGSAQCKELFASALSNDLLQNCQVSEEDGRGEPAMESSQIVSRLVQIRDYITKASSMREDLVEKNERSANVERLTHLIDHLKEQEKSYMKFLKKILARDPQQEPMEEIENLKKQHDLLKRMLQQQEQLRALQGRQAALLALQHKAEQAIAVMDDSVVAETAGSLSGVSITSELNEELNDLIQRFHNQLRDSQPPAVPDNRRQAESLSLTREVSQSRKPSASERLPDEKVELFSKMRVLQEKKQKMDKLLGELHTLRDQHLNNSSSSPQRSVDQRSTSAPSASVGLAPVVNGESNSLTSSVPYPTASLVSQNESENEGHLNPSEKLQKLNEVRKRLNELRELVHYYEQTSDMMTDAVNENRKDEETEESEYDSEHENSEPVTNIRNPQVASTWNEVNSHSNAQCVSNNRDGRTVNSNCEINNRSAANIRALNMPPSLDCRYNREGEQEIHVAQGEDDEEEEEEAEEEGVSGASLSSHRSSLVDEHPEDAEFEQKINRLMAAKQKLRQLQDLVAMVQDDDAAQGVISASASNLDDFYPAEEDTKQNSNNTRGNANKTQKDTGVNEKAREKFYEAKLQQQQRELKQLQEERKKLIDIQEKIQALQTACPDLQLSAASVGNCPTKKYMPAVTSTPTVNQHETSTSKSVFEPEDSSIVDNELWSEMRRHEMLREELRQRRKQLEALMAEHQRRQGLAETASPVAVSLRSDGSENLCTPQQSRTEKTMATWGGSTQCALDEEGDEDGYLSEGIVRTDEEEEEEQDASSNDNFSVCPSNSVNHNSYNGKETKNRWKNNCPFSADENYRPLAKTRQQNISMQRQENLRWVSELSYVEEKEQWQEQINQLKKQLDFSVSICQTLMQDQQTLSCLLQTLLTGPYSVMPSNVASPQVHFIMHQLNQCYTQLTWQQNNVQRLKQMLNELMRQQNQHPEKPGGKERGSSASHPPSPSLFCPFSFPTQPVNLFNIPGFTNFSSFAPGMNFSPLFPSNFGDFSQNISTPSEQQQPLAQNSSGKTEYMAFPKPFESSSSIGAEKPRNKKLPEEEVESSRTPWLYEQEGEVEKPFIKTGFSVSVEKSTSSNRKNQLDTNGRRRQFDEESLESFSSMPDPVDPTTVTKTFKTRKASAQASLASKDKTPKSKSKKRNSTQLKSRVKNIRYESASMSSTCEPCKSRNRHSAQTEEPVQAKVFSRKNHEQLEKIIKCNRSTEISSETGSDFSMFEALRDTIYSEVATLISQNESRPHFLIELFHELQLLNTDYLRQRALYALQDIVSRHISESHEKGENVKSVNSGTWIASNSELTPSESLATTDDETFEKNFERETHKISEQNDADNASVLSVSSNFEPFATDDLGNTVIHLDQALARMREYERMKTEAESNSNMRCTCRIIEDGDGAGAGTTVNNLEETPVIENRSSQQPVSEVSTIPCPRIDTQQLDRQIKAIMKEVIPFLKEHMDEVCSSQLLTSVRRMVLTLTQQNDESKEFVKFFHKQLGSILQDSLAKFAGRKLKDCGEDLLVEISEVLFNELAFFKLMQDLDNNSITVKQRCKRKIEATGVIQSCAKEAKRILEDHGSPAGEIDDEDKDKDETETVKQTQTSEVYDGPKNVRSDISDQEEDEESEGCPVSINLSKAETQALTNYGSGEDENEDEEMEEFEEGPVDVQTSLQANTEATEENEHDEQVLQRDFKKTAESKNVPLEREATSKNDQNNCPVKPCYLNILEDEQPLNSAAHKESPPTVDSTQQPNPLPLRLPEMEPLVPRVKEVKSAQETPESSLAGSPDTESPVLVNDYEAESGNISQKSDEEDFVKVEDLPLKLTIYSEADLRKKMVEEEQKNHLSGEICEMQTEELAGNSETLKEPETVGAQSIXDVFRGSSNSVLTYSMHI

SEQ ID NO: 1138 - protein, 467 aa, Homo Sapiens
  misc_feature (450)..(450): Xaa can be any naturally occurring amino acid
MLPAATASLLGPLLTACALLPFAQGQTPNYTRPVFLCGGDVKGESGYVASEGFPNLYPPNKECIWTITVPEGQTVSLSFRVFDLELHPACRYDALEVFAGSGTSGQRLGRFCGTFRPAPLVAPGNQVTLRMTTDEGTGGRGFLLWYSGRATSGTEHQFCGGRLEKAQGTLTTPNWPESDYPPGISCSWHIIAPPDQVIALTFEKFDLEPDTYCRYDSVSVFNGAVSDDSRRLGKFCGDAVPGSISSEGNELLVQFVSDLSVTADGFSASYKTLPRGTAKEGQGPGPKRGTEPKVKLPPKSQPPEKTEESPSAPDAPTCPKQCRRTGTLQSNFCASSLVVTATVKSMVREPGEGLAVTVSLIGAYKTGGLDLPSPPTGASLKFYVPCKQCPPMKKGVSYLLMGQVEENRGPVLPPESFVVLHRPNQDQILTNLSKRKCPSQPVRAAASQDXDAGQPRPLALRPSFLSK

SEQ ID NO: 1139 - protein, 262 aa, Homo Sapiens
  misc_feature (247)..(247): Xaa can be any naturally occurring amino acid
MEEAKSQSLEEDFEGQATHTGPKGVINDWRKFKLESQDSDSIPPSKKEILRQMSSPQSRNGKDSKERVSRKMSIQEYELIHKEKEDENCLRKYRRQCMQDMHQKLSFGPRYGFVYELETGKQFLETIEKELKITTIVVHIYEDGIKGCDALNSSLTCLAAEYPIVKFCKIKASNTGAGDRFSLDVLPTLLIYKGGELISNFISVAEQFAEEFFAGDVESFLNEYGLLPEREVHVLEHTKIEEEDVEXRFTMSISHVYPLGIG

SEQ ID NO: 1140 - protein, 641 aa, Homo Sapiens
  misc_feature (635)..(635): Xaa can be any naturally occurring amino acid
MESPTKEIEEFESNSLKYLQPEQIEKIWLRLRGLRKYKKTSQRLRSLVKQLERGEASVVDLKKNLEYAATVLESVYIDETRRLLDTEDELSDIQSDAVPSEVRDWLASTFTRQMGMMLRRSDEKPRFKSIVHAVQAGIFVERMYRRTSNMVGLSYPPAVIEALKDVDKWSFDVFSLNEASGDHALKFIFYELLTRYDLISRFKIPISALVSFVEALEVGYSKHKNPYHNLMHAADVTQTVHYLLYKTGVANWLTELEIFAIIFSAAIHDYEHTGTTNNFHIQTRSDPAILYNDRSVLENHHLSAAYRLLQDDEEMNILINLSKDDWREFRTLVIEMVMATDMSCHFQQIKAMKTALQQPEAIEKPKALSLMLHTADISHPAKAWDLHHRWTMSLLEEFFRQGDREAELGLPFSPLCDRKSTMVAQSQVGFIDFIVEPTFTVLTDMTEKIVSPLIDETSQTGGTGQRRSSLNSISSSDAKRSGVKTSGSEGSAPINNSVISVDYKSFKATWTEVVHINRERWRAKVPKEEKAKKEAEEKARLAAEEQQKEMEAKSQAEEGASGKAEKKTSGETKNQVNGTRANKSDNPRGKNSKAEKSSGEQQQNGDFKDGKNKTDKKDHSNIGNDSKKTDDSQEXKRPHRQ

SEQ ID NO: 1141 - protein, 883 aa, Homo Sapiens
  misc_feature (876)..(876): Xaa can be any naturally occurring amino acid
MERAGPSFGQQRQQQQPQQQKQQQRDQDSVEAWLDDHWDFTFSYFVRKATREMVNAWFAERVHTIPVCKEGIRGHTESCSCPLQQSPRADNSAPGTPTRKISASEFDRPLRPIVVKDSEGTVSFLSDSEKKEQMPLTPPRFDHDEGDQCSRLLELVKDISSHLDVTALCHKIFLHIHGLISADRYSLFLVCEDSSNDKFLISRLFDVAEGSTLEEVSNNCIRLEWNKGIVGHVAALGEPLNIKDAYEDPRFNAEVDQITGYKTQSILCMPIKNHREEVVGVAQAINKKSGNGGTFTEKDEKDFAAYLAFCGIVLHNAQLYETSLLENKRNQVLLDLASLIFEEQQSLEVILKKIAATIISFMQVQKCTIFIVDEDCSDSFSSVFHMECEELEKSSDTLTREHDANKINYMYAQYVKNTMEPLNIPDVSKDKRFPWTTENTGNVNQQCIRSLLCTPIKNGKKNKVIGVCQLVNKMEENTGKVKPFNRNDEQFLEAFVIFCGLGIQNTQMYEAVERAMAKQMVTLEVLSYHASAAEEETRELQSLAAAVVPSAQTLKITDFSFSDFELSDLETALCTIRMFTDLNLVQNFQMKHEVLCRWILSVKKNYRKNVAYHNWRHAFNTAQCMFAALKAGKIQNKLTDLEILALLIAALSHDLDHRGVNNSYIQRSEHPLAQLYCHSIMEHHHFDQCLMILNSPGNQILSGLSIEEYKTTLKIIKQAILATDLALYIKRRGEFFELIRKNQFNLEDPHQKELFLAMLMTACDLSAITKPWPIQQRIAELVATEFFDQGDRERKELNIEPTDLMNREKKNKIPSMQVGFIDAICLQLYEALTHVSEDCFPLLDGCRKNRQKWQALAEQQEKMLINGESGQAKRNXVAYFMQS

SEQ ID NO: 1142 - protein, 451 aa, Homo Sapiens
  misc_feature (437)..(437): Xaa can be any naturally occurring amino acid
MRLARLLRGAALAGPGPGLRAAGFSRSFSSDSGSSPASERGVPGQVDFYARFSPSPLSMKQFLDFGSVNACEKTSFMFLRQELPVRLANIMKEISLLPDNLLRTPSVQLVQSWYIQSLQELLDFKDKSAEDAKAIYDFTDTVIRIRNRHNDVIPTMAQGVIEYKESFGVDPVTSQNVQYFLDRFYMSRISIRMLLNQHSLLFGGKGKGSPSHRKHIGSINPNCNVLEVIKDGYENARRLCDLYYINSPELELEELNAKSPGQPIQVVYVPSHLYHMVFELFKNAMRATMEHHANRGVYPPIQVHVTLGNEDLTVKMSDRGGGVPLRKIDRLFNYMYSTAPRPRVETSRAVPLAGFGYGLPISRLYAQYFQGDLKLYSLEGYGTDAVIYIKALSTDSIERLPVYNKAAWKHYNTNHEADDWCVPSREPKDMTTFRSAXTHLGHRKIQMWLLY

SEQ ID NO: 1143 - protein, 512 aa, Homo Sapiens
  misc_feature (494)..(494): Xaa can be any naturally occurring amino acid
MAAATGPSFWLGNETLKVPLALFALNRQRLCERLRKNPAVQAGSIVVLQGGEETQRYCTDTGVLFRQESFFHWAFGVTEPGCYGVIDVDTGKSTLFVPRLPASHATWMGKIHSKEHFKEKYAVDDVQYVDEIASVLTSQKPSVLLTLRGVNTDSGSVCREASFDGISKFEVNNTILHPEIVECRVFKTDMELEVLRYTNKISSEAHREVMKAVKVGMKEYELESLFEHYCYSRGGMRHSSYTCICGSGENSAVLHYGHAGAPNDRTIQNGDMCLFDMGGEYYCFASDITCSFPANGKFTADQKAVYEAVLRSSRAVMGAMKPGVWWPDMHRLADRIHLEELAHMGILSGSVDAMVQAHLGAVFMPHGLGHFLGIDVHDVGGYPEGVERIDEPGLRSLRTARHLQPGMVLTVEPGIYFIDHLLDEALADPARASFLNREVLQRFRGFGGVRIEEDVVVTDSGIELLTCVPRTVEEIEACMAGCDKAFTPFSGPKXSQPEIPAHLGAWPCNLFS

SEQ ID NO: 1144 - protein, 1311 aa, Homo Sapiens
  misc_feature (1284)..(1284): Xaa can be any naturally occurring amino acid
MWGSDRLAGAGGGGAAVTVAFTNARDCFLHLPRRLVAQLHLLQNQAIEVVWSHQPAFLSWVEGRHFSDQGENVAEINRQVGQKLGLSNGGQVFLKPCSHVVSCQQVEVEPLSADDWEILELHAVSLEQHLLDQIRIVFPKAIFPVWVDQQTYIFIQIVALIPAASYGRLETDTKLLIQPKTRRAKENTFSKADAEYKKLHSYGRDQKGMMKELQTKQLQSNTVGITESNENESEIPVDSSSVASLWTMIGSIFSFQSEKKQETSWGLTEINAFKNMQSKVVPLDNIFRVCKSQPPSIYNASATSVFHKHCAIHVFPWDQEYFDVEPSFTVTYGKLVKLLSPKQQQSKTKQNVLSPEKEKQMSEPLDQKKIRSDHNEEDEKACVLQVVWNGLEELNNAIKYTKNVEVLHLGKVWIPDDLRKRLNIEMHAVVRITPVEVTPKIPRSLKLQPRENLPKDISEEDIKTVFYSWLQQSTTTMLPLVISEEEFIKLETKDGLKEFSLSIVHSWEKEKDKNIFLLSPNLLQKTTIQVLLDPMVKEENSEEIDFILPFLKLSSLGGVNSLGVSSLEHITHSLLGRPLSRQLMSLVAGLRNGALLLTGGKGSGKSTLAKAICKEAFDKLDAHVERVDCKALRGKRLENIQKTLEVAFSEAVWMQPSVVLLDDLDLIAGLPAVPEHEHSPDAVQSQRLAHALNDMIKEFISMGSLVALIATSQSQQSLHPLLVSAQGVHIFQCVQHIQPPNQEQRCEILCNVIKNKLDCDINKFTDLDLQHVAKETGGFVARDFTVLVDRAIHSRLSRQSISTREKLVLTTLDFQKALRGFLPASLRSVNLHKPRDLGWDKIGGLHEVRQILMDTIQLPAKYPELFANLPIRQRTGILLYGPPGTGKTLLAGVIARESRMNFISVKGPELLSKYIGASEQAVRDIFIRAQAAKPCILFFDEFESIAPRRGHDNTGVTDRVVNQLLTQLDGVEGLQGVYVLAATSRPDLIDPALLRPGRLDKCVYCPPPDQVSRLEILNVLSDSLPLADDVDLQHVASVTDSFTGADLKALLYNAQLEALHGMLLSSGLQDGSSSSDSDLSLSSMVFLNHSSGSDDSAGDGECGLDQSLVSLEMSEILPDESKFNMYRLYFGSSYESELGNGTSSDLSSQCLSAPSSMTQDLPGVPGKDQLFSQPPVLRTASQEGCQELTQEQRDQLRADISIIKGRYRSQSGEDESMNQPGPIKTRLAISQSHLMTALGHTRPSISEDDWKNFAELYESFQNPKRRKNQSGTMFRPGQKVTLAXNILLFDLVLLSFLMAFPYVVTGKKWCL

SEQ ID NO: 1145 - protein, 347 aa, Homo Sapiens
  misc_feature (327)..(327): Xaa can be any naturally occurring amino acid
MAPAAASPPEVIRAAQKDEYYRGGLRSAAGGALHSLAGARKWLEWRKEVELLSDVAYFGLTTLAGYQTLGEEYVSIIQVDPSRIHVPSSLRRGVLVTLHAVLPYLLDKALLPLEQELQADPDSGRPLQGSLGPGGRGCSGARRWMRHHTATLTEQQRRALLRAVFVLRQGLACLQRLHVAWFYIHGVFYHLAKRLTGITYLRVRSLPGEDLRARVSYRLLGVISLLHLVLSMGLQLYGFRQRQRARKEWRLHRGLSHRRASLEERAVSRNPLCTLCLEERRHPTATPCGHLFCWECITAWCSSKAECPLCREKFPPQKLIYLRHYRXAGARVGLDTDDLYGSLNAKI

SEQ ID NO: 1146 - protein, 389 aa, Homo Sapiens
  misc_feature (378)..(378): Xaa can be any naturally occurring amino acid
MVATEDERLAGSGEGERLDFLRDRHVRFFQRCLQVLPERYSSLETSRLTIAFFALSGLDMLDSLDVVNKDDIIEWIYSLQVLPTEDRSNLNRCGFRGSSYLGIPFNPSKAPGTAHPYDSGHIAMTYTGLSCLVILGDDLSRVNKEACLAGLRALQLEDGSFCAVPEGSENDMRFVYCASCICYMLNNWSGMDMKKAITYIRRSMSYDNGLAQGAGLESHGGSTFCGIASLCLMGKLEEVFSEKELNRIKRWCIMRQQNGYHGRPNKPVDTCYSFWVGATLKLLKIFQYTNFEKNRNYILSTQDRLVGGFAKWPDSHPDALHAYFGICGLSLMEESGICKVHPALNVSTRTSERLLDLHQSWKTKDSKQCSENVHISTXLILDWEGGGDL

SEQ ID NO: 1147 - protein, 423 aa, Homo Sapiens
  misc_feature (418)..(418): Xaa can be any naturally occurring amino acid
MSLSNKLTLDKLDVKGKRVVMRVDFNVPMKNNQITNNQRIKAAVPSIKFCLDNGAKSVVLMSHLGRPDGVPMPDKYSLEPVAVELKSLLGKDVLFLKDCVGPEVEKACANPAAGSVILLENLRFHVEEEGKGKDASGNKVKAEPAKIEAFRASLSKLGDVYVNDAFGTAHRAHSSMVGVNLPQKAGGFLMKKELNYFAKALESPERPFLAILGGAKVADKIQLINNMLDKVNEMIIGGGMAFTFLKVLNNMEIGTSLFDEEGAKIVKDLMSKAEKNGVKITLPVDFVTADKFDENAKTGQATVASGIPAGWMGLDCGPESSKKYAEAVTRAKQIVWNGPVGVFEWEAFARGTKALMDEVVKATSRGCITIIGGGDTATCCAKWNTEDKVSHVSTGGGASLELLEGKVLPGVDALSNIXYFPAF

SEQ ID NO: 1148 - protein, 891 aa, Homo Sapiens
  misc_feature (888)..(888): Xaa can be any naturally occurring amino acid
MGEAEKFHYIYSCDLDINVQLKIGSLEGKREQKSYKAVLEDPMLKFSGLYQETCSDLYVTCQVFAEGKPLALPVRTSYKAFSTRWNWNEWLKLPVKYPDLPRNAQVALTIWDVYGPGKAVPVGGTTVSLFGKYGMFRQGMHDLKVWPNVEADGSEPTKTPGRTSSTLSEDQMSRLAKLTKAHRQGHMVKVDWLDRLTFREIEMINESEKRSSNFMYLMVEFRCVKCDDKEYGIVYYEKDGDESSPILTSFELVKVPDPQMSMENLVESKHHKLARSLRSGPSDHDLKPNAATRDQLNIIVSYPPTKQLTYEEQDLVWKFRYYLTNQEKALTKFLKCVNWDLPQEAKQALELLGKWKPMDVEDSLELLSSHYTNPTVRRYAVARLRQADDEDLLMYLLQLVQALKYENFDDIKNGLEPTKKDSQSSVSENVSNSGINSAEIDSSQIITSPLPSVSSPPPASKTKEVPDGENLEQDLCTFLISRACKNSTLANYLYWYVIVECEDQDTQQRDPKTHEMYLNVMRRFSQALLKGDKSVRVMRSLLAAQQTFVDRLVHLMKAVQRESGNRKKKNERLQALLGDNEKMNLSDVELIPLPLEPQVKIRGIIPETATLFKSALMPAQLFFKTEDGGKYPVIFKHGDDLRQDQLILQIISLMDKLLRKENLDLKLTPYKVLATSTKHGFMQFIQSVPVAEVLDTEGSIQNFFRKYAPSENGPNGISAEVMDTYVKSCAGYCVITYILGVGDRHLDNLLLTKTGKLFHIDFGYILGRDPKPLPPPMKLNKEMVEGMGGTQSEQYQEFRKQCYTAFLHLRRYSNLILNLFSLMVDANIPDIALEPDKTVKKVQDKFRLDLSDEEAVHYMQSLIDESVHALFAAVVEQIHKFAQYWRKXNWD

SEQ ID NO: 1149 - protein, 168 aa, Homo Sapiens
  misc_feature (145)..(145): Xaa can be any naturally occurring amino acid
MKTLLLLAVIMIFGLLQAHGNLVNFHRMIKLTTGKEAALSYGFYGCHCGVGGRGSPKDATDRCCVTHDCCYKRLEKRGCGTKFLSYKFSNSGSRITCAKQDSCRSQLCECDKAAATCFARNKTTYNKKYQYYSNKHCRGSTPRCXVPSSLETFHPVLNFPLSYPPSLP

SEQ ID NO: 1150 - protein, 4612 aa, Homo Sapiens
  misc_feature (4575)..(4575): Xaa can be any naturally occurring amino acid
MSGEDAEVRAVSEDVSNGSSGSPSPGDTLPWNLGKTQRSRRSGGGAGSNGSVLDPAERAVIRIADERDRVQKKTFTKWVNKHLIKAQRHISDLYEDLRDGHNLISLLEVLSGDSLPREKGRMRFHKLQNVQIALDYLRHRQVKLVNIRNDDIADGNPKLTLGLIWTIILHFQISDIQVSGQSEDMTAKEKLLLWSQRMVEGYQGLRCDNFTSSWRDGRLFNAIIHRHKPLLIDMNKVYRQTNLENLDQAFSVAERDLGVTRLLDPEDVDVPQPDEKSIITYVSSLYDAMPRVPDVQDGVRANELQLRWQEYRELVLLLLQWMRHHTAAFEERRFPSSFEEIEILWSQFLKFKEMELPAKEADKNRSKGIYQSLEGAVQAGQLKVPPGYHPLDVEKEWGKLHVAILEREKQLRSEFERLECLQRIVTKLQMEAGLCEEQLNQADALLQSDVRLLAAGKVPQRAGEVERDLDKADSMIRLLFNDVQTLKDGRHPQGEQMYRRVYRLHERLVAIRTEYNLRLKAGVAAPATQVAQVTLQSVQRRPELEDSTLRYLQDLLAWVEENQHRVDGAEWGVDLPSVEAQLGSHRGLHQSIEEFRAKIERARSDEGQLSPATRGAYRDCLGRLDLQYAKLLNSSKARLRSLESLHSFVAAATKELMWLNEKEEEEVGFDWSDRNTNMTAKKESYSALMRELELKEKKIKELQNAGDRLLREDHPARPTVESFQAALQTQWSWMLQLCCCIEAHLKENAAYFQFFSDVREAEGQLQKLQEALRRKYSCDRSATVTRLEDLLQDAQDEKEQLNEYKGHLSGLAKRAKAVVQLKPRHPAHPMRGRLPLLAVCDYKQVEVTVHKGDECQLVGPAQPSHWKVLSSSGSEAAVPSVCFLVPPPNQEAQEAVTRLEAQHQALVTLWHQLHVDMKSLLAWQSLRRDVQLIRSWSLATFRTLKPEEQRQALHSLELHYQAFLRDSQDAGGFGPEDRLMAEREYGSCSHHYQQLLQSLEQGAQEESRCQRCISELKDIRLQLEACETRTVHRLRLPLDKEPARECAQRIAEQQKAQAEVEGLGKGVARLSAEAEKVLALPEPSPAAPTLRSELELTLGKLEQVRSLSAIYLEKLKTISLVIRGTQGAEEVLRAHEEQLKEAQAVPATLPELEATKASLKKLRAQAEAQQPTFDALRDELRGAQEVGERLQQRHGERDVEVERWRERVAQLLERWQAVLAQTDVRQRELEQLGRQLRYYRESADPLGAWLQDARRRQEQIQAMPLADSQAVREQLRQEQALLEEIERHGEKVEECQRFAKQYINAIKDYELQLVTYKAQLEPVASPAKKPKVQSGSESVIQEYVDLRTHYSELTTLTSQYIKFISETLRRMEEEERLAEQQRAEERERLAEVEAALEKQRQLAEAHAQAKAQAEREAKELQQRMQEEVVRREEAAVDAQQQKRSIQEELQQLRQSSEAEIQAKARQAEAAERSRLRIEEEIRVVRLQLEATERQRGGAEGELQALRARAEEAEAQKRQAQEEAERLRRQVQDESQRKRQAEVELASRVKAEAEAAREKQRALQALEELRLQAEEAERRLRQAEVERARQVQVALETAQRSAEAELQSKRASFAEKTAQLERSLQEEHVAVAQLREEAERRAQQQAEAERAREEAERELERWQLKANEALRLRLQAEEVAQQKSLAQAEAEKQKEEAEREARRRGKAEEQAVRQRELAEQELEKQRQLAEGTAQQRLAAEQELIRLRAETEQGEQQRQLLEEELARLQREAAAATQKRQELEAELAKVRAEMEVLLASKARAEEESRSTSEKSKQRLEAEAGRFRELAEEAARLRALAEEAKRQRQLAEEDAARQRAEAERVLAEKLAAIGEATRLKTEAEIALKEKEAENERLRRLAEDEAFQRRRLEEQAAQHKADIEERLAQLRKASDSELERQKGLVEDTLRQRRQVEEEILALKASFEKAAAGKAELELELGRIRSNAEDTLRSKEQAELEAARQRQLAAEEERRRREAEERVQKSLAAEEEAARQRKAALEEVERLKAKVEEARRLRERAEQESARQLQLAQEAAQKRLQAEEKAHAFAVQQKEQELQQTLQQEQSVLDQLRGEAEAARRAAEEAEEARVQAEREAAQSRRQVEEAERLKQSAEEQAQARAQAQAAAEKLRKEAEQEAARRAQAEQAALRQKQAADAEMEKHKKFAEQTLRQKAQVEQELTTLRLQLEETDHQKNLLDEELQRLKAEATEAARQRSQVEEELFSVRVQMEELSKLKARIEAENRALILRDKDNTQRFLQEEAEKMKQVAEEAARLSVAAQEAARLRQLAEEDLAQQRALAEKMLKEKMQAVQEATRLKAEAELLQQQKELAQEQARRLQEDKEQMAQQLAEETQGFQRTLEAERQRQLEMSAEAERLKLRVAEMSRAQARAEEDAQRFRKQAEEIGEKLHRTELATQEKVTLVQTLEIQRQQSDHDAERLREAIAELEREKEKLQQEAKLLQLKSEEMQTVQQEQLLQETQALQQSFLSEKDSLLQRERFIEQEKAKLEQLFQDEVAKAQQLREEQQRQQQQMEQERQRLVASMEEARRRQHEAEEGVRRKQEELQQLEQQRRQQEELLAEENQRLREQLQLLEEQHRAALAHSEEVTASQVAATKTLPNGRDALDGPAAEAEPEHSFDGLRRKVSAQRLQEAGILSAEELQRLAQGHTTVDELARREDVRHYLQGRSSIAGLLLKATNEKLSVYAALQRQLLSPGTALILLEAQAASGFLLDPVRNRRLTVNEAVKEGVVGPELHHKLLSAERAVTGYKDPYTGQQISLFQAMQKGLIVREHGIRLLEAQIATGGVIDPVHSHRVPVDVAYRRGYFDEEMNRVLADPSDDTKGFFDPNTHENLTYLQLLERCVEDPETGLCLLPLTDKAAKGGELVYTDSEARDVFEKATVSAPFGKFQGKTVTIWEIINSEYFTAEQRRDLLRQFRTGRITVEKIIKIIITVVEEQEQKGRLCFEGLRSLVPAAELLESRVIDRELYQQLQRGERSVRDVAEVDTVRRALRGANVIAGVWLEEAGQKLSIYNALKKDLLPSDMAVALLEAQAGTGHIIDPATSARLTVDEAVRAGLVGPEFHEKLLSAEKAVTGYRDPYTGQSVSLFQALKKGLIPREQGLRLLDAQLSTGGIVDPSKSHRVPLDVACARGCLDEETSRALSAPRADAKAYSDPSTGEPATYGELQQRCRPDQLTGLSLLPLSEKAARARQEELYSELQARETFEKTPVEVPVGGFKGRTVTVWELISSEYFTAEQRQELLRQFRTGKVTVEKVIKILITIVEEVETLRQERLSFSGLRAPVPASELLASGVLSRAQFEQLKDGKTTVKDLSELGSVRTLLQGSGCLAGIYLEDTKEKVSIYEAMRRGLLRATTAALLLEAQAATGFLVDPVRNQRLYVHEAVKAGVVGPELHEQLLSAEKAVTGYRDPYSGSTISLFQAMQKGLVLRQHGIRLLEAQIATGGIIDPVHSHRVPVDVAYQRGYFSEEMNRVLADPSDDTKGFFDPNTHENLTYRQLLERCVEDPETGLRLLPLKGAEKAEVVETTQVYTEEETRRAFEETQIDIPGGGSHGGSTMSLWEVMQSDLIPEEQRAQLMADFQAGRVTKERMIIIIIEIIEKTEIIRQQGLASYDYVRRRLTAEDLFEARIISLETYNLLREGTRSLREALEAESAWCYLYGTGSVAGVYLPGSRQTLSIYQALKKGLLSAEVARLLLEAQAATGFLLDPVKGERLTVDEAVRKGLVGPELHDRLLSAERAVTGYRDPYTEQTISLFQAMKKELIPTEEALRLLDAQLATGGIVDPRLGFHLPLEVAYQRGYLNKDTHDQLSEPSEVRSYVDPSTDERLSYTQLLRRCRRDDGTGQLLLPLSDARKLTFRGLRKQITMEELVRSQVMDEATALQLREGLTSIEEVTKNLQKFLEGTSCIAGVFVDATKERLSVYQAMKKGIIRPGTAFELLEAQAATGYVIDPIKGLKLTVEEAVRMGIVGPEFKDKLLSAERAVTGYKDPYSGKLISLFQAMKKGLILKDHGIRLLEAQIATGGIIDPEESHRLPVEVAYKRGLFDEEMNEILTDPSDDTKGFFDPNTEENLTYLQLMERCITDPQTGLCLLPLKEKKRERKTSSKSSVRKRRVVIVDPETGKEMSVYEAYRKGLIDHQTYLELSEQECEWEEITISSSDGVVKSMIIDRRSGRQYDIDDAIAKNLIDRSALDQYRAGTLSITEFADMLSGNAGGFRSRSSSVGSSSSYPISPAVSRTQLASWSDPTEETGPVAGILDTETLEKVSITEAMHRNLVDNITGQRLLEAQACTGGIIDPSTGERFPVTDAVNKGLVDKIMVDRINLAQKAFCGFEDPRTKTKMSAAQALKKGWLYYEAGQRFLEVQYLTGGLIEPDTPGRVPLDEALQRGTVDARTAQKLRDVGAYSKYLTCPKTKLKISYKDALDRSMVEEGTGLRLLEAAAQSTKGYYSPYSVSGSGSTAGSRTGSRTGSRAGSRRGSFDATGSGFSMTFSSSSYSSSGYGRRYASGSSASLGGPESAVAXGCLRPPRSACGPARLPPRRGGRFQRLKVSSSQVVPKV

SEQ ID NO: 1151 - protein, 745 aa, Homo Sapiens
  misc_feature (738)..(738): Xaa can be any naturally occurring amino acid
MGGCTVKPQLLLLALVLHPWNPCLGADSEKPSSIPTDKLLVITVATKESDGFHRFMQSAKYFNYTVKVLGQGEEWRGGDGINSIGGGQKVRLMKEVMEHYADQDDLVVMFTECFDVIFAGGPEEVLKKFQKANHKVVFAADGILWPDKRLADKYPVVHIGKRYLNSGGFIGYAPYVNRIVQQWNLQDNDDDQLFYTKVYIDPLKREAINITLDHKCKIFQTLNGAVDEVVLKFENGKARAKNTFYETLPVAINGNGPTKILLNYFGNYVPNSWTQDNGCTLCEFDTVDLSAVDVHPNVSIGVFIEQPTPFLPRFLDILLTLDYPKEALKLFIHNKEVYHEKDIKVFFDKAKHEIKTIKIVGPEENLSQAEARNMGMDFCRQDEKCDYYFSVDADVVLTNPRTLKILIEQNRKIIAPLVTRHGKLWSNFWGALSPDGYYARSEDYVDIVQGNRVGVWNVPYMANVYLIKGKTLRSEMNERNYFVRDKLDPDMALCRNAREMGVFMYISNRHEFGRLLSTANYNTSHYNNDLWQIFENPVDWKEKYINRDYSKIFTENIVEQPCPDVFWFPIFSEKACDELVEEMEHYGKWSGGKHHDSRISGGYENVPTDDIHMKQVDLENVWLHFIREFIAPVTLKVFAGYYTKGFALLNFVVKYSPERQRSLRPHHDASTFTINIALNNVGEDFQGGGCKFLRYNCSIESPRKGWSFMHPGRLTHLHEGLPVKNGTRYIAVSFIDPXVIYFSLN

SEQ ID NO: 1152 - protein, 766 aa, Homo Sapiens
  misc_feature (759)..(759): Xaa can be any naturally occurring amino acid
MGGCTVKPQLLLLALVLHPWNPCLGADSEKPSSIPTDKLLVITVATKESDGFHRFMQSAKYFNYTVKVLGQGEEWRGGDGINSIGGGQKVRLMKEVMEHYADQDDLVVMFTECFDVIFAGGPEEVLKKFQKANHKVVFAADGILWPDKRLADKYPVVHIGKRYLNSGGFIGYAPYVNRIVQQWNLQDNDDDQLFYTKVYIDPLKREAINITLDHKCKIFQTLNGAVDEVVLKFENGKARAKNTFYETLPVAINGNGPTKILLNYFGNYVPNSWTQDNGCTLCEFDTVDLSAVDVHPNVSIGVFIEQPTPFLPRFLDILLTLDYPKEALKLFIHNKEVYHEKDIKVFFDKAKHEIKTIKIVGPEENLSQAEARNMGMDFCRQDEKCDYYFSVDADVVLTNPRTLKILIEQNRKIIAPLVTRHGKLWSNFWGALSPDGYYARSEDYVDIVQGNRVGVWNVPYMANVYLIKGKTLRSEMNERNYFVRDKLDPDMALCRNAREMTLQREKDSPTPETFQMLSPPKGVFMYISNRHEFGRLLSTANYNTSHYNNDLWQIFENPVDWKEKYINRDYSKIFTENIVEQPCPDVFWFPIFSEKACDELVEEMEHYGKWSGGKHHDSRISGGYENVPTDDIHMKQVDLENVWLHFIREFIAPVTLKVFAGYYTKGFALLNFVVKYSPERQRSLRPHHDASTFTINIALNNVGEDFQGGGCKFLRYNCSIESPRKGWSFMHPGRLTHLHEGLPVKNGTRYIAVSFIDPXVIYFSLN

SEQ ID NO: 1153 - protein, 636 aa, Homo Sapiens
  misc_feature (631)..(631): Xaa can be any naturally occurring amino acid
MDEMATTQISKDELDELKEAFAKVDLNSNGFICDYELHELFKEANMPLPGYKVREIIQKLMLDGDRNKDGKISFDEFVYIFQEVKSSDIAKTFRKAINRKEGICALGGTSELSSEGTQHSYSEEEKYAFVNWINKALENDPDCRHVIPMNPNTDDLFKAVGDGIVLCKMINLSVPDTIDERAINKKKLTPFIIQENLNLALNSASAIGCHVVNIGAEDLRAGKPHLVLGLLWQIIKIGLFADIELSRNEALAALLRDGETLEELMKLSPEELLLRWANFHLENSGWQKINNFSADIKDSKAYFHLLNQIAPKGQKEGEPRIDINMSGFNETDDLKRAESMLQQADKLGCRQFVTPADVVSGNPKLNLAFVANLFNKYPALTKPENQDIDWTLLEGETREERTFRNWMNSLGVNPHVNHLYADLQDALVILQLYERIKVPVDWSKVNKPPYPKLGANMKKLENCNYAVELGKHPAKFSLVGIGGQDLNDGNQTLTLALVWQLMRRYTLNVLEDLGDGQKANDDIIVNWVNRTLSEAGKSTSIQSFKDKTISSSLAVVDLIDAIQPGCINYDLVKSGNLTEDDKHNNAKYAVSMARRIGARVYALPEDLVEVKPKMVMTVFACLMGRGMKRVXNNQSE

SEQ ID NO: 1154 - protein, 2003 aa, Homo Sapiens
  misc_feature (1872)..(1872): Xaa can be any naturally occurring amino acid
MPSVCLLLLLFLAVGGALGNRPFRAFVVTDTTLTHLAVHRVTGEVFVGAVNRVFKLAPNLTELRAHVTGPVEDNARCYPPPSMRVCAHRLAPVDNINKLLLIDYAARRLVACGSIWQGICQFLRLDDLFKLGEPHHRKEHYLSGAQEPDSMAGVIVEQGQGPSKLFVGTAVDGKSEYFPTLSSRKLISDEDSADMFSLVYQDEFVSSQIKIPSDTLSLYPAFDIYYIYGFVSASFVYFLTLQLDTQQTLLDTAGEKFFTSKIVRMCAGDSEFYSYVEFPIGCSWRGVEYRLVQSAHLAKPGLLLAQALGVPADEDVLFTIFSQGQKNRASPPRQTILCLFTLSNINAHIRRRIQSCYRGEGTLALPWLLNKELPCINTPMQINGNFCGLVLNQPLGGLHVIEGLPLLADSTDGMASVAAYTYRQHSVVFIGTRSGSLKKVRVDGFQDAHLYETVPVVDGSPILRDLLFSPDHRHIYLLSEKQVSQLPVETCEQYQSCAACLGSGDPHCGWCVLRHRCCREGACLGASAPHGFAEELSKCVQVRVRPNNVSVTSPGVQLTVTLHNVPDLSAGVSCAFEAAAENEAVLLPSGELLCPSPSLQELRALTRGHGATRTVRLQLLSKETGVRFAGADFVFYNCSVLQSCMSCVGSPYPCHWCKYRHTCTSRPHECSFQEGRVHSPEGCPEILPSGDLLIPVGVMQPLTLRAKNLPQPQSGQKNYECVVRVQGRQQRVPAVRFNSSSVQCQNASYSYEGDEHGDTELDFSVVWDGDFPIDKPPSFRALLYKCWAQRPSCGLCLKADPRFNCGWCISEHRCQLRTHCPAPKTNWMHLSQKGTRCSHPRITQIHPLVGPKEGGTRVTIVGDNLGLLSREVGLRVAGVRCNSIPAEYISAERIVCEMEESLVPSPPPGPVELCVGDCSADFRTQSEQVYSFVTPTFDQVSPSRGPASGGTRLTISGSSLDAGSRVTVTVRDSECQFVRRDAKAIVCISPLSTLGPSQAPITLAIDRANISSPGLIYTYTQDPTVTRLEPTWSIINGSTAITVSGTHLLTVQEPRVRAKYRGIETTNTCQVINDTAMLCKAPGIFLGRPQPRAQGEHPDEFGFLLDHVQTARSLNRSSFTYYPDPSFEPLGPSGVLDVKPGSHVVLKGKNLIPAAAGSSRLNYTVLIGGQPCSLTVSDTQLLCDSPSQTGRQPVMVLVGGLEFWLGTLHISAERALTLPAMMGLAAGGGLLLLAITAVLVAYKRKTQDADRTLKRLQLQMDNLESRVALECKEAFAELQTDINELTNHMDEVQIPFLDYRTYAVRVLFPGIEAHPVLKELDTPPNVEKALRLFGQLLHSRAFVLTFIHTLEAQSSFSMRDRGTVASLTMVALQSRLDYATGLLKQLLADLIEKNLESKNHPKLLLRRTESVAEKMLTNWFTFLLHKFLKECAGEPLFLLYCAIKQQMEKGPIDAITGEARYSLSEDKLIRQQIDYKTLTLHCVCPENEGSAQVPVKVLNCDSITQAKDKLLDTVYKGIPYSQRPKAEDMDLEWRQGRMTRIILQDEDVTTKIECDWKRLNSLAHYQVTDGSLVALVPKQVSAYNMANSFTFTRSLSRYESLLRTASSPDSLRSRAPMITPDQETGTKLWHLVKNHDHADHREGDRGSKMVSEIYLTRLLATKGTLQKFVDDLFETVFSTAHRGSALPLAIKYMFDFLDEQADQRQISDPDVRHTWKSNCLPLRFWVNVIKNPQFVFDIHKNSITDACLSVVAQTFMDSCSTSEHRLGKDSPSNKLLYAKDIPNYKSWVERYYRDIAKMASISDQDMDAYLVEQSRLHASDFSVLSALNELYFYVTKYRQEILTALDRDASCRKHKLRQKLEQIISLVSSDSXGGGIGEEGASQSCAVLPSRGVAGSSLGPRAEPWIGYRGAGHPGHDAPGTPRPPSLVPCFGPCRGRGDRASPHPSSSNTPTLLPCAQVLGQSHPPCYLYPSAYLLNRTSPLSPSVNMCPPTGCRHPHSPASS

SEQ ID NO: 1155 - protein, 273 aa, Homo Sapiens
  misc_feature (263)..(263): Xaa can be any naturally occurring amino acid
MAVTAQAARRRERVLCLFDVDGTLTPARQKIDPEVAAFLQKLRSRVQIGVVGGSDYCKIAEQLGDGDEVIEKFDYVFAENGTVQYKHGRLLSKQTIQNHLGEELLQDLINFCLSYMALLRLPKKRGTFIEFRNGMLNISPIGRSCTLEERIEFSELDKKEKIREKFVEDLKTEFAGKGLRFSRGGMISFDVFPEGWDKRYCLDSLDQDSFDTIHFFGNETSPGGNDFEIFADPRTVGHSVVSPQDTVQRCREIFFPETAHEAXPGPTSVCRDF

SEQ ID NO: 1156 - protein, 471 aa, Homo Sapiens
  misc_feature (466)..(466): Xaa can be any naturally occurring amino acid
MLPLWTLSLLLGAVAGKEVCYERLGCFSDDSPWSGITERPLHILPWSPKDVNTRFLLYTNENPNNFQEVAADSSSISGSNFKTNRKTRFIIHGFIDKGEENWLANVCKNLFKVESVNCICVDWKGGSRTGYTQASQNIRIVGAEVAYFVEFLQSAFGYSPSNVHVIGHSLGAHAAGEAGRRTNGTIGRITGLDPAEPCFQGTPELVRLDPSDAKFVDVIHTDGAPIVPNLGFGMSQVVGHLDFFPNGGVEMPGCKKNILSQIVDIDGIWEGTRDFAACNHLRSYKYYTDSIVNPDGFAGFPCASYNVFTANKCFPCPSGGCPQMGHYADRYPGKTNDVGQKFYLDTGDASNFARWRYKVSVTLSGKKVTGHILVSLFGNKGNSKQYEIFKGTLKPDSTHSNEFDSDVDVGDLQMVKFIWYNNVINPTLPRVGASKIIVETNVGKQFNFCSPETVREEVLLTLTPCXETTVI

SEQ ID NO: 1157 - protein, 1474 aa, Homo Sapiens
  misc_feature (1463)..(1463): Xaa can be any naturally occurring amino acid
MAPVHGDDSLSDSGSFVSSRARREKKSKKGRQEALERLKKAKAGEKYKYEVEDFTGVYEEVDEEQYSKLVQARQDDDWIVDDDGIGYVEDGREIFDDDLEDDALDADEKGKDGKARNKDKRNVKKLAVTKPNNIKSMFIACAGKKTADKAVDLSKDGLLGDILQDLNTETPQITPPPVMILKKKRSIGASPNPFSVHTATAVPSGKIASPVSRKEPPLTPVPLKRAEFAGDDVQVESTEEEQESGAMEFEDGDFDEPMEVEEVDLEPMAAKAWDKESEPAEEVKQEADSGKGTVSYLGSFLPDVSCWDIDQEGDSSFSVQEVQVDSSHLPLVKGADEEQVFHFYWLDAYEDQYNQPGVVFLFGKVWIESAETHVSCCVMVKNIERTLYFLPREMKIDLNTGKETGTPISMKDVYEEFDEKIATKYKIMKFKSKPVEKNYAFEIPDVPEKSEYLEVKYSAEMPQLPQDLKGETFSHVFGTNTSSLELFLMNRKIKGPCWLEVKSPQLLNQPVSWCKVEAMALKPDLVNVIKDVSPPPLVVMAFSMKTMQNAKNHQNEIIAMAALVHHSFALDKAAPKPPFQSHFCVVSKPKDCIFPYAFKEVIEKKNVKVEVAATERTLLGFFLAKVHKIDPDIIVGHNIYGFELEVLLQRINVCKAPHWSKIGRLKRSNMPKLGGRSGFGERNATCGRMICDVEISAKELIRCKSYHLSELVQQILKTERVVIPMENIQNMYSESSQLLYLLEHTWKDAKFILQIMCELNVLPLALQITNIAGNIMSRTLMGGRSERNEFLLLHAFYENNYIVPDKQIFRKPQQKLGDEDEEIDGDTNKYKKGRKKAAYAGGLVLDPKVGFYDKFILLLDFNSLYPSIIQEFNICFTTVQRVASEAQKVTEDGEQEQIPELPDPSLEMGILPREIRKLVERRKQVKQLMKQQDLNPDLILQYDIRQKALKLTANSMYGCLGFSYSRFYAKPLAALVTYKGREILMHTKEMVQKMNLEVIYGDTDSIMINTNSTNLEEVFKLGNKVKSEVNKLYKLLEIDIDGVFKSLLLLKKKKYAALVVEPTSDGNYVTKQELKGLDIVRRDWCDLAKDTGNFVIGQILSDQSRDTIVENIQKRLIEIGENVLNGSVPVSQFEINKALTKDPQDYPDKKSLPHVHVALWINSQGGRKVKAGDTVSYVICQDGSNLTASQRAYAPEQLQKQDNLTIDTQYYLAQQIHPVVARICEPIDGIDAVLIATWLGLDPTQFRVHHYHKDEENDALLGGPAQLTDEEKYRDCERFKCPCPTCGTENIYDNVFDGSGTDMEPSLYRCSNIDCKASPLTFTVQLSNKLIMDIRRFIKKYYDGWLICEEPTCRNRTRHLPLQFSRTGPLCPACMKATLQPEYSDKSLYTQLCFYRYIFDAECALEKLTTDHEKDKLKKQFFTPKVLQDYRKLKNTAEQFLSRSGYSEVNLSKLFAGCAVKSXGNPRSNQGGGS

SEQ ID NO: 1158 - protein, 373 aa, Homo Sapiens
  misc_feature (355)..(355): Xaa can be any naturally occurring amino acid
MGKLVALVLLGVGLSLVGEMFLAFRERVNASREVEPVEPENCHLIEELESGSEDIDILPSGLAFISSGLKYPGMPNFAPDEPGKIFLMDLNEQNPRAQALEISGGFDKELFNPHGISIFIDKDNTVYLYVVNHPHMKSTVEIFKFEEQQRSLVYLKTIKHELLKSVNDIVVLGPEQFYATRDHYFTNSLLSFFEMILDLRWTYVLFYSPREVKVVAKGFCSANGITVSADQKYVYVADVAAKNIHIMEKHDNWDLTQLKVIQLGTLVDNLTVDPATGDILAGCHPNPMKLLNYNPEDPPGSEVLRIQNVLSEKPRVSTVYANNGSVLQGTSVASVYHGKILIGTVFHKTLYCELXTLDSKKKKKKSTYFVKVN

SEQ ID NO: 1159 - protein, 143 aa, Homo Sapiens
  misc_feature (129)..(129): Xaa can be any naturally occurring amino acid
MSLRLDTTPSCNSARPLHALQVLLLLSLLLTALASSTKGQTKRNLAKGKEESLDSDLYAELRCMCIKTTSGIHPKNIQSLEVIGKGTHCNQVEVIATLKDGRKICLDPDAPRIKKIVQKKLAGDESADXFVLFLPNFFNSQEG

SEQ ID NO: 1160 - protein, 716 aa, Homo Sapiens
  misc_feature (654)..(654): Xaa can be any naturally occurring amino acid
MGCSSSSTKTRRSDTSLRAALIIQNWYRGYKARLKARQHYALTIFQSIEYADEQGQMQLSTFFSFMLENYTHIHKEELELRNQSLESEQDMRDRWDYVDSIDVPDSYNGPRLQFPLTCTDIDLLLEAFKEQQILHAHYVLEVLFETKKVLKQMPNFTHIQTSPSKEVTICGDLHGKLDDLFLIFYKNGLPSERNPYVFNGDFVDRGKNSIEILMILCVSFLVYPNDLHLNRGNHEDFMMNLRYGFTKEILHKYKLHGKRILQILEEFYAWLPIGTIVDNEILVIHGGISETTDLNLLHRVERNKMKSVLIPPTETNRDHDTDSKHNKVGVTFNAHGRIKTNGSPTEHLTEHEWEQIIDILWSDPRGKNGCFPNTCRGGGCYFGPDVTSKILNKYQLKMLIRSHECKPEGYEICHDGKVVTIFSASNYYEEGSNRGAYIKLCSGTTPRFFQYQVTKATCFQPLRQRVDTMENSAIKILRERVISRKSDLTRAFQLQDHRKSGKLSVSQWAFCMENILGLNLPWRSLSSNLVNIDQNGNVEYMSSFQNIRIEKPVQEAHSTLVETLYRYRSDLEIIFNAIDTDHSGLISVEEFRAMWKLFSSHYNVHIDDSQVNKLANIMDLNKDGSIDFNEFLKAFYVVHRYEDLMKPDVTNLGXTQMRASLRLPETARPKSQVQSFPTPLKFIVSSREKQIPIHPTNRCIVWVLEVPSKLLLVRLG

SEQ ID NO: 1161 - protein, 677 aa, Homo Sapiens
  misc_feature (603)..(603): Xaa can be any naturally occurring amino acid
MPYKLKKEKEPPKVAKCTAKPSSSGKDGGGENTEEAQPQPQPQPQPQAQSQPPSSNKRPSNSTPPPTQLSKIKYSGGPQIVKKERRQSSSRFNLSKNRELQKLPALKDSPTQEREELFIQKLRQCCVLFDFVSDPLSDLKFKEVKRAGLNEMVEYITHSRDVVTEAIYPEAVTMFSVNLFRTLPPSSNPTGAEFDPEEDEPTLEAAWPHLQLVYEFFLRFLESPDFQPNIAKKYIDQKFVLALLDLFDSEDPRERDFLKTILHRIYGKFLGLRAYIRRQINHIFYRFIYETEHHNGIAELLEILGSIINGFALPLKEEHKMFLIRVLLPLHKVKSLSVYHPQLAYCVVQFLEKESSLTEPVIVGLLKFWPKTHSPKEVMFLNELEEILDVIEPSEFSKVMEPLFRQLAKCVSSPHFQVAERALYYWNNEYIMSLISDNAARVLPIMFPALYRNSKSHWNKTIHGLIYNALKLFMEMNQKLFDDCTQQYKAEKQKGRFRMKEREEMWQKIEELARLNPQYPMFRAPPPLPPVYSMETETPTAEDIQLLKRTVETEAVQMLKDIKKEKVLLRRKSELPQDVYTIKALEAHKRAEEFLTASQEALXPLTFLPQGHSPHSPGTLPWPSILCSLLAVLGEGSASLATQGRGMWALEAGTPTEWSLFSPKGVHASLWLVQAEH

SEQ ID NO: 1162 - protein, 645 aa, Homo Sapiens
  misc_feature (571)..(571): Xaa can be any naturally occurring amino acid
MPYKLKKEKEPPKVAKCTAKPSSSGKDGGGENTEEAQPQPQPQPQPQAQSQPPSSNKRPSNSTPPPTQLSKIKYSGGPQIVKKELFIQKLRQCCVLFDFVSDPLSDLKFKEVKRAGLNEMVEYITHSRDVVTEAIYPEAVTMFSVNLFRTLPPSSNPTGAEFDPEEDEPTLEAAWPHLQLVYEFFLRFLESPDFQPNIAKKYIDQKFVLALLDLFDSEDPRERDFLKTILHRIYGKFLGLRAYIRRQINHIFYRFIYETEHHNGIAELLEILGSIINGFALPLKEEHKMFLIRVLLPLHKVKSLSVYHPQLAYCVVQFLEKESSLTEPVIVGLLKFWPKTHSPKEVMFLNELEEILDVIEPSEFSKVMEPLFRQLAKCVSSPHFQVAERALYYWNNEYIMSLISDNAARVLPIMFPALYRNSKSHWNKTIHGLIYNALKLFMEMNQKLFDDCTQQYKAEKQKGRFRMKEREEMWQKIEELARLNPQYPMFRAPPPLPPVYSMETETPTAEDIQLLKRTVETEAVQMLKDIKKEKVLLRRKSELPQDVYTIKALEAHKRAEEFLTASQEALXPLTFLPQGHSPHSPGTLPWPSILCSLLAVLGEGSASLATQGRGMWALEAGTPTEWSLFSPKGVHASLWLVQAEH

SEQ ID NO: 1163 - protein, 571 aa, Homo Sapiens
  misc_feature (497)..(497): Xaa can be any naturally occurring amino acid
MPYKLKKEKELFIQKLRQCCVLFDFVSDPLSDLKFKEVKRAGLNEMVEYITHSRDVVTEAIYPEAVTMFSVNLFRTLPPSSNPTGAEFDPEEDEPTLEAAWPHLQLVYEFFLRFLESPDFQPNIAKKYIDQKFVLALLDLFDSEDPRERDFLKTILHRIYGKFLGLRAYIRRQINHIFYRFIYETEHHNGIAELLEILGSIINGFALPLKEEHKMFLIRVLLPLHKVKSLSVYHPQLAYCVVQFLEKESSLTEPVIVGLLKFWPKTHSPKEVMFLNELEEILDVIEPSEFSKVMEPLFRQLAKCVSSPHFQVAERALYYWNNEYIMSLISDNAARVLPIMFPALYRNSKSHWNKTIHGLIYNALKLFMEMNQKLFDDCTQQYKAEKQKGRFRMKEREEMWQKIEELARLNPQYPMFRAPPPLPPVYSMETETPTAEDIQLLKRTVETEAVQMLKDIKKEKVLLRRKSELPQDVYTIKALEAHKRAEEFLTASQEALXPLTFLPQGHSPHSPGTLPWPSILCSLLAVLGEGSASLATQGRGMWALEAGTPTEWSLFSPKGVHASLWLVQAEH

SEQ ID NO: 1164 - protein, 576 aa, Homo Sapiens
  misc_feature (510)..(510): Xaa can be any naturally occurring amino acid
MERRRLWGSIQSRYISMSVWTSPRRLVELAGQSLLKDEALAIAALELLPRELFPPLFMAAFDGRHSQTLKAMVQAWPFTCLPLGVLMKGQHLHLETFKAVLDGLDVLLAQEVRPRRWKLQVLDLRKNSHQDFWTVWSGNRASLYSFPEPEAAQPMTKKRKVDGLSTEAEQPFIPVEVLVDLFLKEGACDELFSYLIEKVKRKKNVLRLCCKKLKIFAMPMQDIKMILKMVQLDSIEDLEVTCTWKLPTLAKFSPYLGQMINLRRLLLSHIHASSYISPEKEEQYIAQFTSQFLSLQCLQALYVDSLFFLRGRLDQLLRHVMNPLETLSITNCRLSEGDVMHLSQSPSVSQLSVLSLSGVMLTDVSPEPLQALLERASATLQDLVFDECGITDDQLLALLPSLSHCSQLTTLSFYGNSISISALQSLLQHLIGLSNLTHVLYPVPLESYEDIHGTLHLERLAYLHARLRELLCELGRPSMVWLSANPCPHCGDRTFYDPEPILCPCFMPNXLGAHIKCFILHTWTLKPGCACILKQQSSHSFRQMFSVSEENMFSEEKTFRQMFSEEKKGKLGIGRC

SEQ ID NO: 1165 - protein, 499 aa, Homo Sapiens
  misc_feature (475)..(475): Xaa can be any naturally occurring amino acid
MSIQAPPRLLELAGQSLLRDQALSISAMEELPRVLYLPLFREAFSRRHFQTLTVMVQAWPFTCLPLVSLMKTLHLEPLKALLEGLHMLLTQKDRPRRWKLQVLDLRDVDENFWARWPGAWALSCFPEAMSKRQTAEDCPRTGEHQPLKVFIDICLKEIPQDECLRYLFQWVYQRRGLVHLCCSKLVNYLTPIKYLRKSLKIIYINSIGELEIHNTCWPHLIRKLYCYLKEMKTLCKLVFSRCHHYTSDNELEGWLVTRFTSVFLRLEHLQLLKIKLITFFSGHLEQLIRCLQNPLENLELTCGNLLEEDLKCLSQFPSLGYLKHLNLSYVLLFRISLEPLGALLEKIAASLETLVLEGCQIHYSQLSAILPGLSCCSQLTTFYFGSNCMSIDALKDLLRHTSGLSKLSLETYPAPEESLNSLVRVNWEIFTPLRAELMCTLREFRQPKRIFIGPTPCPSCGSSPSEELELHLCCXGRRAQWGREIQSSLPGTWTLKSTM

SEQ ID NO: 1166 - protein, 520 aa, Homo Sapiens
  misc_feature (492)..(492): Xaa can be any naturally occurring amino acid
MSLVAYASSDESEPDEAEPEPEEEEAVAPTSGPALGGLFASLPAPKGPALLPPPPQMLAPAFPPPLLLPPPTGDPRLQPPPPLPFGLGGFPPPPGVSPAEAAGVGEGLGLGLPSPRGPGLNLPPPIGGAGPPLGLPKPKKRKEPVKIAAPELHKGDSDSEEDEPTKKKTILQGSSEGTGLSALLPQPKNLTVKETNRLLLPHAFSRKPSDGSPDTKPSRLASKTKTSSLAPVVGTTTTTPSPSAIKAAAKSAALQVTKQITQEEDDSDEEVAPENFFSLPEKAEPPGVEPYPYPIPTVPEELPPGTEPEPAFQDDAANAPLEFKMAAGSSGAPWMPKPGDDYSYNQFSTYGDANAAGAYYQDYYSGGYYPAQDPALVPPQEIAPDASFIDDEAFKRLQGKRNRGREEINFVEIKGDDQLSGAQQWMTKSLTEEKTMKSFSKKKGEQPTGQQRRKHQITYLIHQAKERELELKNTWSENKLSRRQTQAKYGFXGSGTDCSQDLLPAQLAWPPASPLGPQLL

SEQ ID NO: 1167 - protein, 267 aa, Homo Sapiens; identical to SEQ ID NO: 7
  misc_feature (257)..(257): Xaa can be any naturally occurring amino acid

SEQ ID NO: 1168 - protein, 438 aa, Homo Sapiens
  misc_feature (382)..(382): Xaa can be any naturally occurring amino acid
MESGSTAASEEARSLRECELYVQKHNIQALLKDSIVQLCTARPERPMAFLREYFERLEKEEAKQIQNLQKAGTRTDSREDEISPPPPNPVVKGRRRRGAISAEVYTEEDAASYVRKVIPKDYKTMAALAKAIEKNVLFSHLDDNERSDIFDAMFSVSFIAGETVIQQGDEGDNFYVIDQGETDVYVNNEWATSVGEGGSFGELALIYGTPRAATVKAKTNVKLWGIDRDSYRRILMGSTLRKRKMYEEFLSKVSILESLDKWERLTVADALEPVQFEDGQKIVVQGEPGDEFFIILEGSAAVLQRRSENEEFVEVGRLGPSDYFGEIALLMNRPRAATVVARGPLKCVKLDRPRFERVLGPCSDILKRNIQQYNSFVSLSVXNLPPVPPFSPLPNPCFTHANCFIFPTCSAKWPLASQLPVCLYIESCFYCTIFNLEH

SEQ ID NO: 1169 - protein, 614 aa, Homo Sapiens
  misc_feature (597)..(597): Xaa can be any naturally occurring amino acid
MPTQRDSSTMSHTVAGGGSGDHSHQVRVKAYYRGDIMITHFEPSISFEGLCNEVRDMCSFDNEQLFTMKWIDEEGDPCTVSSQLELEEAFRLYELNKDSELLIHVFPCVPERPGMPCPGEDKSIYRRGARRWRKLYCANGHTFQAKRFNRRAHCAICTDRIWGLGRQGYKCINCKLLVHKKCHKLVTIECGRHSLPQEPVMPMDQSSMHSDHAQTVIPYNPSSHESLDQVGEEKEAMNTRESGKASSSLGLQDFDLLRVIGRGSYAKVLLVRLKKTDRIYAMKVVKKELVNDDEDIDWVQTEKHVFEQASNHPFLVGLHSCFQTESRLFFVIEYVNGGDLMFHMQRQRKLPEEHARFYSAEISLALNYLHERGIIYRDLKLDNVLLDSEGHIKLTDYGMCKEGLRPGDTTSTFCGTPNYIAPEILRGEDYGFSVDWWALGVLMFEMMAGRSPFDIVGSSDNPDQNTEDYLFQVILEKQIRIPRSLSVKAASVLKSFLNKDPKERLGCHPQTGFADIQGHPFFRNVDWDMMEQKQVVPPFKPNISGEFGLDNFDSQFTNEPVQLTPDDDDIVRKIDQSEFEGFEYINPLLMSAEECVXSSFFNHVFYSCCHLMHG

SEQ ID NO: 1170 - protein, 702 aa, Homo Sapiens
  misc_feature (687)..(687): Xaa can be any naturally occurring amino acid
MGTLRDLQYALQEKIEELRQRDALIDELELELDQKDELIQKLQNELDKYRSVIRPATQQAQKQSASTLQGEPRTKRQAISAEPTAFDIQDLSHVTLPFYPKSPQSKDLIKEAILDNDFMKNLELSQIQEIVDCMYPVEYGKDSCIIKEGDVGSLVYVMEDGKVEVTKEGVKLCTMGPGKVFGELAILYNCTRTATVKTLVNVKLWAIDRQCFQTIMMRTGLIKHTEYMEFLKSVPTFQSLPEEILSKLADVLEETHYENGEYIIRQGARGDTFFIISKGTVNVTREDSPSEDPVFLRTLGKGDWFGEKALQGEDVRTANVIAAEAVTCLVIDRDSFKHLIGGLDDVSNKAYEDAEAKAKYEAEAAFFANLKLSDFNIIDTLGVGGFGRVELVQLKSEESKTFAMKILKKRHIVDTRQQEHIRSEKQIMQGAHSDFIVRLYRTFKDSKYLYMLMEACLGGELWTILRDRGSFEDSTTRFYTACVVEAFAYLHSKGIIYRDLKPENLILDHRGYAKLVDFGFAKKIGFGKKTWTFCGTPEYVAPEIILNKGHDISADYWSLGILMYELLTGSPPFSGPDPMKTYNIILRGIDMIEFPKKIAKNAANLIKKLCRDNPSERLGNLKNGVKDIQKHKWFEGFNWEGLRKGTLTPPIIPSVASPTDTSNFDSFPEDNDEPPPDDNSGWDIDFXCISLTCFCLAEDSFF

SEQ ID NO: 1171 - protein, 767 aa, Homo Sapiens
  misc_feature (763)..(763): Xaa can be any naturally occurring amino acid
MGNGSVKPKHSKHPDGHSGNLTTDALRNKVTELERELRRKDAEIQEREYHLKELREQLSKQTVAIAELTEELQNKCIQLNKLQDVVHMQGGSPLQASPDKVPLEVHRKTSGLVSLHSRRGAKAGVSAEPTTRTYDLNKPPEFSFEKARVRKDSSEKKLITDALNKNQFLKRLDPQQIKDMVECMYGRNYQQGSYIIKQGEPGNHIFVLAEGRLEVFQGEKLLSSIPMWTTFGELAILYNCTRTASVKAITNVKTWALDREVFQNIMRRTAQARDEQYRNFLRSVSLLKNLPEDKLTKIIDCLEVEYYDKGDYIIREGEEGSTFFILAKGKVKVTQSTEGHDQPQLIKTLQKGEYFGEKALISDDVRSANIIAEENDVACLVIDRETFNQTVGTFEELQKYLEGYVANLNRDDEKRHAKRSMSNWKLSKALSLEMIQLKEKVARFSSSSPFQNLEIIATLGVGGFGRVELVKVKNENVAFAMKCIRKKHIVDTKQQEHVYSEKRILEELCSPFIVKLYRTFKDNKYVYMLLEACLGGELWSILRDRGSFDEPTSKFCVACVTEAFDYLHRLGIIYRDLKPENLILDAEGYLKLVDFGFAKKIGSGQKTWTFCGTPEYVAPEVILNKGHDFSVDFWSLGILVYELLTGNPPFSGVDQMMTYNLILKGIEKMDFPRKITRRPEDLIRRLCRQNPTERLGNLKNGINDIKKHRWLNGFNWEGLKARSLPSPLQRELKGPIDHSYFDKYPPEKGMPPDELSGWDKDFXQKKS

SEQ ID NO: 1172 - protein, 468 aa, Homo Sapiens
  misc_feature (434)..(434): Xaa can be any naturally occurring amino acid
MATSGDCPRSESQGEEPAECSEAGLLQEGVQPEEFVAIADYAATDETQLSFLRGEKILILRQTTADWWWGERAGCCGYIPANHVGKHVDEYDPEDTWQDEEYFGSYGTLKLHLEMLADQPRTTKYHSVILQNKESLTDKVILDVGCGTGIISLFCAHYARPRAVYAVEASEMAQHTGQLVLQNGFADIITVYQQKVEDVVLPEKVDVLVSEWMGTCLLFEFMIESILYARDAWLKEDGVIWPTMAALHLVPCSADKDYRSKVLFWDNAYEFNLSALKSLAVKEFFSKPKYNHILKPEDCLSEPCTILQLDMRTVQISDLETLRGELRFDIRKAGTLHGFTAWFSVHFQSLQEGQPPQVLSTGPFHPTTHWKQTLFMMDDPVPVHTGDVVTGSVVLQRNPVWRRHMSVALSWAVTSRQDPTSQKVGEKVFPIWRXQLMLYLESSVHILRGDEHKQTKLHLASAHSCESR

SEQ ID NO: 1173 - protein, 269 aa, Homo Sapiens
  misc_feature (254)..(254): Xaa can be any naturally occurring amino acid
MANLGCWMLVLFVATWSDLGLCKKRPKPGGWNTGGSRYPGQGSPGGNRYPPQGGGGWGQPHGGGWGQPHGGGWGQPHGGGWGQPHGGGWGQGGGTHSQWNKPSKPKTNMKHMAGAAAAGAVVGGLGGYMLGSAMSRPIIHFGSDYEDRYYRENMHRYPNQVYYRPMDEYSNQNNFVHDCVNITIKQHTVTTTTKGENFTETDVKMMERVVEQMCITQYERESQAYYQRGSSMVLFSSPPVILLISFLIFLIVGXGRSSCFHHLSNLFPA

SEQ ID NO: 1174 - protein, 268 aa, Homo Sapiens
  misc_feature (239)..(239): Xaa can be any naturally occurring amino acid
MLTTLLPILLLSGWAFCSQDASDGLQRLHMLQISYFRDPYHVWYQGNASLGGHLTHVLEGPDTNTTIIQLQPLQEPESWARTQSGLQSYLLQFHGLVRLVHQERTLAFPLTIRCFLGCELPPEGSRAHVFFEVAVNGSSFVSFRPERALWQADTQVTSGVVTFTLQQLNAYNRTRYELREFLEDTCVQYVQKHISAENTKGSQTSRSYTSLVLGVLVGSFIIAGVAVGIFLCTGGRRCXLLSSPLRRGWIDGGWQGKVSAHCEARLPN

SEQ ID NO: 1175 - protein, 690 aa, Homo Sapiens
  misc_feature (677)..(677): Xaa can be any naturally occurring amino acid
MRVLGGRCGAPLACLLLVLPVSEANLLSKQQASQVLVRKRRANSLLEETKQGNLERECIEELCNKEEAREVFENDPETDYFYPKYLVCLRSFQTGLFTAARQSTNAYPDLRSCVNAIPDQCSPLPCNEDGYMSCKDGKASFTCTCKPGWQGEKCEFDINECKDPSNINGGCSQICDNTPGSYHCSCKNGFVMLSNKKDCKDVDECSLKPSICGTAVCKNIPGDFECECPEGYRYNLKSKSCEDIDECSENMCAQLCVNYPGGYTCYCDGKKGFKLAQDQKSCEVVSVCLPLNLDTKYELLYLAEQFAGVVLYLKFRLPEISRFSAEFDFRTYDSEGVILYAESIDHSAWLLIALRGGKIEVQLKNEHTSKITTGGDVINNGLWNMVSVEELEHSISIKIAKEAVMDINKPGPLFKPENGLLETKVYFAGFPRKVESELIKPINPRLDGCIRSWNLMKQGASGIKEIIQEKQNKHCLVTVEKGSYYPGSGIAQFHIDYNNVSSAEGWHVNVTLNIRPSTGTGVMLALVSGNNTVPFAVSLVDSTSEKSQDILLSVENTVIYRIQALSLCSDQQSHLEFRVNRNNLELSTPLKIETISHEDLQRQLAVLDKAMKAKVATYLGGLPDVPFSATPVNAFYNGCMEVNINGVQLDLDEAISKHNDIRAHSCPSVWKKTKNSXGIFSLLIIPFPCV

SEQ ID NO: 1176 - protein, 405 aa, Homo Sapiens
  misc_feature (401)..(401): Xaa can be any naturally occurring amino acid
MAGCVPLLQGLVLVLALHRVEPSVFLPASKANDVLVRWKRAGSYLLEELFEGNLEKECYEEICVYEEAREVFENEVVTDEFWRRYKGGSPCISQPCLHNGSCQDSIWGYTCTCSPGYEGSNCELAKNECHPERTDGCQHFCLPGQESYTCSCAQGYRLGEDHKQCVPHDQCACGVLTSEKRAPDLQDLPWQVKLTNSEGKDFCGGVIIRENFVLTTAKCSLLHRNITVKTYFNRTSQDPLMIKITHVHVHMRYDADAGENDLSLLELEWPIQCPGAGLPVCTPEKDFAEHLLIPRTRGLLSGWARNGTDLGNSLTTRPVTLVEGEECGQVLNVTVTTRTYCERSSVAAMHWMDGSVVTREHRGSWFLTGVLGSQPVGGQAHMVLVTKVSRYSLWFKQIMNXLKLS

SEQ ID NO: 1177 - protein, 587 aa, Homo Sapiens
  misc_feature (525)..(525): Xaa can be any naturally occurring amino acid
MYALFLLASLLGAALAGPVLGLKECTRGSAVWCQNVKTASDCGAVKHCLQTVWNKPTVKSLPCDICKDVVTAAGDMLKDNATEEEILVYLEKTCDWLPKPNMSASCKEIVDSYLPVILDIIKGEMSRPGEVCSALNLCESLQKHLAELNHQKQLESNKIPELDMTEVVAPFMANIPLLLYPQDGPRSKPQPKDNGDVCQDCIQMVTDIQTAVRTNSTFVQALVEHVKEECDRLGPGMADICKNYISQYSEIAIQMMMHMQPKEICALVGFCDEVKEMPMQTLVPAKVASKNVIPALELVEPIKKHEVPAKSDVYCEVCEFLVKEVTKLIDNNKTEKEILDAFDKMCSKLPKSLSEECQEVVDTYGSSILSILLEEVSPELVCSMLHLCSGTRLPALTVHVTQPKDGGFCEVCKKLVGYLDRNLEKNSTKQEILAALEKGCSFLPDPYQKQCDQFVAEYEPVLIEILVEVMDPSFVCLKIGACPSAHKPLLGTEKCIWGPSYWCQNTETAAQCNAVEHCKRHVWNXEEEYSILAETTALVFFYLCVWGNERTDLFDFVIKIGLPHLPHFCVLYCSIAVCKGAPSPWQT

SEQ ID NO: 1178 - protein, 1028 aa, Homo Sapiens
  misc_feature (1025)..(1025): Xaa can be any naturally occurring amino acid
MAQGAMRFCSEGDCAISPPRCPRRWLPEGPVPQSPPASMYGSTGSLLRRVAGPGPRGRELGRVTAPCTPLRGPPSPRVAPSPWAPSSPTGQPPPGAQSSVVIFRFVEKASVRPLNGLPAPGGLSRSWDLGGVSPPRPTPALGPGSNRKLRLEASTSDPLPARGGSALPGSRNLVHGPPAPPQVGADGLYSSLPNGLGGPPERLATLFGGPADTGFLNQGDTWSSPREVSSHAQRIARAKWEFFYGSLDPPSSGAKPPEQAPPSPPGVGSRQGSGVAVGRAAKYSETDLDTVPLRCYRETDIDEVLAEREEADSAIESQPSSEGPPGTAYPPAPRPGPLPGPHPSLGSGNEDEDDDEAGGEEDVDDEVFEASEGARPGSRMPLKSPVPFLPGTSPSADGPDSFSCVFEAILESHRAKGTSYTSLASLEALASPGPTQSPFFTFELPPQPPAPRPDPPAPAPLAPLEPDSGTSSAADGPWTQRGEEEEAEARAKLAPGREPPSPCHSEDSLGLGAAPLGSEPPLSQLVSDSDSELDSTERLALGSTDTLSNGQKADLEAAQRLAKRLYRLDGFRKADVARHLGKNNDFSKLVAGEYLKFFVFTGMTLDQALRVFLKELALMGETQERERVLAHFSQRYFQCNPEALSSEDGAHTLTCALMLLNTDLHGHNIGKRMTCGDFIGNLEGLNDGGDFPRELLKALYSSIKNEKLQWAIDEEELRRSLSELADPNPKVIKRISGGSGSGSSPFLDLTPEPGAAVYKHGALVRKVHADPDCRKTPRGKRGWKSFHGILKGMILYLQKEEYKPGKALSETELKNAISIHHALATRASDYSKRPHVFYLRTADWRVFLFQAPSLEQMQSWITRINVVAAMFSAPPFPAAVSSQKKFSRPLLPSAATRLSQEEQVRTHEAKLKAMASELREHRAAQLGKKGRGKEAEEQRQKEAYLEFEKSRYSTYAALLRVKLKAGSEELDAVEAALAQAGSTEDGLPPSHSSPSLQPKPSSQPRAQRHSSEPRPGAGSGRRKPXDEV

SEQ ID NO: 1179 - protein, 483 aa, Homo Sapiens
  misc_feature (427)..(427): Xaa can be any naturally occurring amino acid
MGTLSAPPCTQRIKWKGLLLTASLLNFWNLPTTAQVTIEAEPTKVSEGKDVLLLVHNLPQNLTGYIWYKGQMRDLYHYITSYVVDGEIIIYGPAYSGRETAYSNASLLIQNVTREDAGSYTLHIIKGDDGTRGVTGRFTFTLHLETPKPSISSSNLNPRETMEAVSLTCDPETPDASYLWWMNGQSLPMTHSLKLSETNRTLFLLGVTKYTAGPYECEIRNPVSASRSDPVTLNLLPKLPKPYITINNLNPRENKDVLNFTCEPKSENYTYIWWLNGQSLPVSPRVKRPIENRILILPSVTRNETGPYQCEIRDRYGGIRSDPVTLNVLYGPDLPRIYPSFTYYRSGEVLYLSCSADSNPPAQYSWTINEKFQLPGQKLFIRHITTKHSGLYVCSVRNSATGKESSKSMTVEVSGKWIPASLAIGFXVESIWHSEKSQENNCIPSLCPMGTSKSQILLLNPPNLSKNFENFNKQADIFIIFPA

SEQ ID NO: 1180 - protein, 440 aa, Homo Sapiens
  misc_feature (434)..(434): Xaa can be any naturally occurring amino acid
MPDYLGADQRKTKEDEKDDKPIRALDEGDIALLKTYGQSTYSRQIKQVEDDIQQLLKKINELTGIKESDTGLAPPALWDLAADKQTLQSEQPLQVARCTKIINADSEDPKYIINVKQFAKFVVDLSDQVAPTDIEEGMRVGVDRNKYQIHIPLPPKIDPTVTMMQVEEKPDVTYSDVGGCKEQIEKLREVVETPLLHPERFVNLGIEPPKGVLLFGPPGTGKTLCARAVANRTDACFIRVIGSELVQKYVGEGARMVRELFEMARTKKACLIFFDEIDAIGGARFDDGAGGDNEVQRTMLELINQLDGFDPRGNIKVLMATNRPDTLDPALMRPGRLDRKIEFSLPDLEGRTHIFKIHARSMSVERDIRFELLARLCPNSTGAEIRSVCTEAGMFAIRARRKIATEKDFLEAVNKVIKSYAKFSATPRYMTYNXTLKAFK

SEQ ID NO: 1181 - protein, 950 aa, Homo Sapiens
  misc_feature (909)..(909): Xaa can be any naturally occurring amino acid
MEEGGRDKAPVQPQQSPAAAPGGTDEKPSGKERRDAGDKDKEQELSEEDKQLQDELEMLVERLGEKDTSLYRPALEELRRQIRSSTTSMTSVPKPLKFLRPHYGKLKEIYENMAPGENKRFAADIISVLAMTMSGERECLKYRLVGSQEELASWGHEYVRHLAGEVAKEWQELDDAEKVQREPLLTLVKEIVPYNMAHNAEHEACDLLMEIEQVDMLEKDIDENAYAKVCLYLTSCVNYVPEPENSALLRCALGVFRKFSRFPEALRLALMLNDMELVEDIFTSCKDVVVQKQMAFMLGRHGVFLELSEDVEEYEDLTEIMSNVQLNSNFLALARELDIMEPKVPDDIYKTHLENNRFGGSGSQVDSARMNLASSFVNGFVNAAFGQDKLLTDDGNKWLYKNKDHGMLSAAASLGMILLWDVDGGLTQIDKYLYSSEDYIKSGALLACGIVNSGVRNECDPALALLSDYVLHNSNTMRLGSIFGLGLAYAGSNREDVLTLLLPVMGDSKSSMEVAGVTALACGMIAVGSCNGDVTSTILQTIMEKSETELKDTYARWLPLGLGLNHLGKGEAIEAILAALEVVSEPFRSFANTLVDVCAYAGSGNVLKVQQLLHICSEHFDSKEKEEDKDKKEKKDKDKKEAPADMGAHQGVAVLGIALIAMGEEIGAEMALRTFGHLLRYGEPTLRRAVPLALALISVSNPRLNILDTLSKFSHDADPEVSYNSIFAMGMVGSGTNNARLAAMLRQLAQYHAKDPNNLFMVRLAQGLTHLGKGTLTLCPYHSDRQLMSQVAVAGLLTVLVSFLDVRNIILGKSHYVLYGLVAAMQPRMLVTFDEELRPLPVSVRVGQAVDVVGQAGKPKTITGFQTHTTPVLLAHGERAELATEEFLPVTPILEGFVILRKNPNYDLXVTTRGSELQLMLSAGHASCCQGWTRLQTSGGIVASCSFVTE

SEQ ID NO: 1182 - protein, 511 aa, Homo Sapiens
  misc_feature (505)..(505): Xaa can be any naturally occurring amino acid
MAAQALALLREVARLEAPLEELRALHSVLQAVPLNELRQQAAELRLGPLFSLLNENHREKTTLCVSILERLLQAMEPVHVARNLRVDLQRGLIHPDDSVKILTLSQIGRIVENSDAVTEILNNAELLKQIVYCIGGENLSVAKAAIKSLSRISLTQAGLEALFESNLLDDLKSVMKTNDIVRYRVYELIIEISSVSPESLNYCTTSGLVTQLLRELTGEDVLVRATCIEMVTSLAYTHHGRQYLAQEGVIDQISNIIVGADSDPFSSFYLPGFVKFFGNLAVMDSPQQICERYPIFVEKVFEMIESQDPTMIGVAVDTVGILGSNVEGKQVLQKTGTRFERLLMRIGHQSKNAPVELKIRCLDAISSLLYLPPEQQTDDLLRMTESWFSSLSRDPLELFRGISSQPFPELHCAALKVFTAIANQPWAQKLMFNSPGFVEYVVDRSVEHDKASKDAKYELVKALANSKTIAEIFGNPNYLRLRTYLSEGPYYVKPVSTTAVEGAEXFLLELM

SEQ ID NO: 1183 - protein, 204 aa, Homo Sapiens
  misc_feature (191)..(191): Xaa can be any naturally occurring amino acid
MATHHTLWMGLALLGVLGDLQAAPEAQVSVQPNFQQDKFLGRWFSAGLASNSSWLREKKAALSMCKSVVAPATDGGLNLTSTFLRKNQCETRTMLLQPAGSLGSYSYRSPHWGSTYSVSVVETDYDQYALLYSQGSKGPGEDFRMATLYSRTQTPRAELKEKFTAFCKAQGFTEDTIVFLPQTDKCMTEQXDSPGLKLGSRPAR

SEQ ID NO: 1184 - protein, 1099 aa, Homo Sapiens
  misc_feature (1075)..(1075): Xaa can be any naturally occurring amino acid
MISADCNLCLPEYDRYLASSKIMAAAYLDPNLNHTPNSSTKTHLGTGMERSPGAMERVLKVFHYFESNSEPTTWASIIRHGDATDVRGIIQKIVDSHKVKHVACYGFRLSHLRSEEVHWLHVDMGVSSVREKYELAHPPEEWKYELRIRYLPKGFLNQFTEDKPTLNFFYQQVKSDYMLEIADQVDQEIALKLGCLEIRRSYWEMRGNALEKKSNYEVLEKDVGLKRFFPKSLLDSVKAKTLRKLIQQTFRQFANLNREESILKFFEILSPVYRFDKECFKCALGSSWIISVELAIGPEEGISYLTDKGCNPTHLADFTQVQTIQYSNSEDKDRKGMLQLKIAGAPEPLTVTAPSLTIAENMADLIDGYCRLVNGTSQSFIIRPQKEGERALPSIPKLANSEKQGMRTHAVSVSETDDYAEIIDEEDTYTMPSTRDYEIQRERIELGRCIGEGQFGDVHQGIYMSPENPALAVAIKTCKNCTSDSVREKFLQEALTMRQFDHPHIVKLIGVITENPVWIIMELCTLGELRSFLQVRKYSLDLASLILYAYQLSTALAYLESKRFVHRDIAARNVLVSSNDCVKLGDFGLSRYMEDSTYYKASKGKLPIKWMAPESINFRRFTSASDVWMFGVCMWEILMHGVKPFQGVKNNDVIGRIENGERLPMPPNCPPTLYSLMTKCWAYDPSRRPRFTELKAQLSTILEEEKAQQEERMRMESRRQATVSWDSGGSDEAPPKPSRPGYPSPRSSEGFYPSPQHMVQTNHYQVSGYPGSHGITAMAGSIYPGQASLLDQTDSWNHRPQEIAMWQPNVEDSTVLDLRGIGQVLPTHLMEERLIRQQQEMEEDQRWLEKEERFLKPDVRLSRGSIDREDGSLQGPIGNQHIYQPVGKPDPAAPPKKPPRPGAPGHLGSLASLSSPADSYNEGVKLQPQEISPPPTANLDRSNDKVYENVTGLVKAVIEMSSKIQPAPPEEYVPMVKEVGLALRTLLATVDETIPLLPASTHREIEMAQKLLNSDLGELINKMKLAQQYVMTSLQQEYKKQMLTAAHALAVDAKNLLDVIDQARLKMLGQTRPHXASPRSTSCYPLLKMFSSLPPAARN

SEQ ID NO: 1185 - protein, 520 aa, Homo Sapiens
  misc_feature (452)..(452): Xaa can be any naturally occurring amino acid
MVSRDQAHLGPKYVGLWDFKSRTDEELSFRAGDVFHVARKEEQWWWATLLDEAGGAVAQGYVPHNYLAERETVESEPWFFGCISRSEAVRRLQAEGNATGAFLIRVSEKPSADYVLSVRDTQAVRHYKIWRRAGGRLHLNEAVSFLSLPELVNYHRAQSLSHGLRLAAPCRKHEPEPLPHWDDWERPREEFTLCRKLGSGYFGEVFEGLWKDRVQVAIKVISRDNLLHQQMLQSEIQAMKKLRHKHILALYAVVSVGDPVYIITELMAKGSLLELLRDSDEKVLPVSELLDIAWQVAEGMCYLESQNYIHRDLAARNILVGENTLCKVGDFGLARLIKEDVYLSHDHNIPYKWTAPEALSRGHYSTKSDVWSFGILLHEMFSRGQVPYPGMSNHEAFLRVDAGYRMPCPLECPPSVHKLMLTCWCRDPEQRPCFKALRERLSSFTSYENPTXAAVERAWPGPAEEGPGQRAWTWDQGPRASLGFTEVMGAGKVHKCGVSASNTRVCSSPYSIVCALGLSC

SEQ ID NO: 1186 - protein, 2017 aa, Homo Sapiens
  misc_feature (1908)..(1908): Xaa can be any naturally occurring amino acid
MAPEPAPGRTMVPLVPALVMLGLVAGAHGDSKPVFIKVPEDQTGLSGGVASFVCQATGEPKPRITWMKKGKKVSSQRFEVIEFDDGAGSVLRIQPLRVQRDEAIYECTATNSLGEINTSAKLSVLEEEQLPPGFPSIDMGPQLKVVEKARTATMLCAAGGNPDPEISWFKDFLPVDPATSNGRIKQLRSGALQIESSEESDQGKYECVATNSAGTRYSAPANLYVRVRRVAPRFSIPPSSQEVMPGGSVNLTCVAVGAPMPYVKWMMGAEELTKEDEMPVGRNVLELSNVVRSANYTCVAISSLGMIEATAQVTVKALPKPPIDLVVTETTATSVTLTWDSGNSEPVTYYGIQYRAAGTEGPFQEVDGVATTRYSIGGLSPFSEYAFRVLAVNSIGRGPPSEAVRARTGEQAPSSPPRRVQARMLSASTMLVQWEPPEEPNGLVRGYRVYYTPDSRRPPNAWHKHNTDAGLLTTVGSLLPGITYSLRVLAFTAVGDGPPSPTIQVKTQQGVPAQPADFQAEVESDTRIQLSWLLPPQERIIMYELVYWAAEDEDQQHKVTFDPTSSYTLEDLKPDTLYRFQLAARSDMGVGVFTPTIEARTAQSTPSAPPQKVMCVSMGSTTVRVSWVPPPADSRNGVITQYSVAYEAVDGEDRGRHVVDGISREHSSWDLVGLEKWTEYRVWVRAHTDVGPGPESSPVLVRTDEDVPSGPPRKVEVEPLNSTAVHVYWKLPVPSKQHGQIRGYQVTYVRLENGEPRGLPIIQDVMLAEAQWRPEESEDYETTISGLTPETTYSVTVAAYTTKGDGARSKPKIVTTTGAVPGRPTMMISTTAMNTALLQWHPPKELPGELLGYRLQYCRADEARPNTIDFGKDDQHFTVTGLHKGTTYIFRLAAKNRAGLGEEFEKEIRTPEDLPSGFPQNLHVTGLTTSTTELAWDPPVLAERNGRIISYTVVFRDINSQQELQNITTDTRFTLTGLKPDTTYDIKVRAWTSKGSGPLSPSIQSRTMPVEQVFAKNFRVAAAMKTSVLLSWEVPDSYKSAVPFKILYNGQSVEVDGHSMRKLIADLQPNTEYSFVLMNRGSSAGGLQHLVSIRTAPDLLPHKPLPASAYIEDGRFDLSMPHVQDPSLVRWFYIVVVPIDRVGGSMLTPRWSTPEELELDELLEAIEQGGEEQRRRRRQAERLKPYVAAQLDVLPETFTLGDKKNYRGFYNRPLSPDLSYQCFVLASLKEPMDQKRYASSPYSDEIVVQVTPAQQQEEPEMLWVTGPVLAVILIILIVIAILLFKRKRTHSPSSKDEQSIGLKDSLLAHSSDPVEMRRLNYQTPGMRDHPPIPITDLADNIERLKANDGLKFSQEYESIDPGQQFTWENSNLEVNKPKNRYANVIAYDHSRVILTSIDGVPGSDYINANYIDGYRKQNAYIATQGPLPETMGDFWRMVWEQRTATVVMMTRLEEKSRVKCDQYWPARGTETCGLIQVTLLDTVELATYTVRTFALHKSGSSEKRELRQFQFMAWPDHGVPEYPTPILAFLRRVKACNPLDAGPMVVHCSAGVGRTGCFIVIDAMLERMKHEKTVDIYGHVTCMRSQRNYMVQTEDQYVFIHEALLEAATCGHTEVPARNLYAHIQKLGQVPPGESVTAMELEFKLLASSKAHTSRFISANLPCNKFKNRLVNIMPYELTRVCLQPIRGVEGSDYINASFLDGYRQQKAYIATQGPLAESTEDFWRMLWEHNSTIIVMLTKLREMGREKCHQYWPAERSARYQYFVVDPMAEYNMPQYILREFKVTDARDGQSRTIRQFQFTDWPEQGVPKTGEGFIDFIGQVHKTKEQFGQDGPITVHCSAGVGRTGVFITLSIVLERMRYEGVVDMFQTVKTLRTQRPAMVQTEDQYQLCYRAALEYLGSFDHYATXLPLPSPPPPPPWGSGGDPAPLSHTDHRPALLRRCCHWQSTAHGDHSVSGTLPHQSESLEHPWASGWPSRQALWPFCPPDPPGARFKLSVALPHFSCFFSWGGVGAKPPF

SEQ ID NO: 1187 - protein, 1511 aa, Homo Sapiens
  misc_feature (1453)..(1453): Xaa can be any naturally occurring amino acid
MRGLGTCLATLAGLLLTAAGETFSGGCLFDEPYSTCGYSQSEGDDFNWEQVNTLTKPTSDPWMPSGSFMLVNASGRPEGQRAHLLLPQLKENDTHCIDFHYFVSSKSNSPPGLLNVYVKVNNGPLGNPIWNISGDPTRTWNRAELAISTFWPNFYQVIFEVITSGHQGYLAIDEVKVLGHPCTRTPHFLRIQNVEVNAGQFATFQCSAIGRTVAGDRLWLQGIDVRDAPLKEIKVTSSRRFIASFNVVNTTKRDAGKYRCMIRTEGGVGISNYAELVVKEPPVPIAPPQLASVGATYLWIQLNANSINGDGPIVAREVEYCTASGSWNDRQPVDSTSYKIGHLDPDTEYEISVLLTRPGEGGTGSPGPALRTRTKCADPMRGPRKLEVVEVKSRQITIRWEPFGYNVTRCHSYNLTVHYCYQVGGQEQVREEVSWDTENSHPQHTITNLSPYTNVSVKLILMNPEGRKESQELIVQTDEDLPGAVPTESIQGSTFEEKIFLQWREPTQTYGVITLYEITYKAVSSFDPEIDLSNQSGRVSKLGNETHFLFFGLYPGTTYSFTIRASTAKGFGPPATNQFTTKISAPSMPAYELETPLNQTDNTVTVMLKPAHSRGAPVSVYQIVVEEERPRRTKKTTEILKCYPVPIHFQNASLLNSQYYFAAEFPADSLQAAQPFTIGDNKTYNGYWNTPLLPYKSYRIYFQAASRANGETKIDCVQVATKGAATPKPVPEPEKQTDHTVKIAGVIAGILLFVIIFLGVVLVMKKRKLAKKRKETMSSTRQEMTVMVNSMDKSYAEQGTNCDEAFSFMDTHNLNGRSVSSPSSFTMKTNTLSTSVPNSYYPDETHTMASDTSSLVQSHTYKKREPADVPYQTGQLHPAIRVADLLQHITQMKCAEGYGFKEEYESFFEGQSAPWDSAKKDENRMKNRYGNIIAYDHSRVRLQTIEGDTNSDYINGNYIDGYHRPNHYIATQGPMQETIYDFWRMVWHENTASIIMVTNLVEVGRVKCCKYWPDDTEIYKDIKVTLIETELLAEYVIRTFAVEKRGVHEIREIRQFHFTGWPDHGVPYHATGLLGFVRQVKSKSPPSAGPLVVHCSAGAGRTGCFIVIDIMLDMAEREGVVDIYNCVRELRSRRVNMVQTEEQYVFIHDAILEACLCGDTSVPASQVRSLYYDMNKLDPQTNSSQIKEEFRTLNMVTPTLRVEDCSIALLPRNHEKNRCMDILPPDRCLPFLITIDGESSNYINAALMDSYKQPSAFIVTQHPLPNTVKDFWRLVLDYHCTSVVMLNDVDPAQLCPQYWPENGVHRHGPIQVEFVSADLEEDIISRIFRIYNAARPQDGYRMVQQFQFLGWPMYRDTPVSKRSFLKLIRQVDKWQEEYNGGEGRTVVHCLNGGGRSGTFCAISIVCEMLRHQRTVDVFHAVKTLRNNKPNMVDLLDQYKFCYEVALEYLNSGXWCKQLCKQSLSYHKAKTFHGICAKEMKTSQYAYFALHNWLFLRAQESVSKIACTAQSQ

SEQ ID NO: 1188 - protein, 879 aa, Homo Sapiens
  misc_feature (844)..(844): Xaa can be any naturally occurring amino acid
MAKPLTDSEKRKQISVRGLAGLGDVAEVRKSFNRHLHFTLVKDRNVATPRDYFFALAHTVRDHLVGRWIRTQQHYYERDPKRIYYLSLEFYMGRTLQNTMVNLGLQNACDEAIYQLGLDLEELEEIEEDAGLGNGGLGRLAACFLDSMATLGLAAYGYGIRYEFGIFNQKIVNGWQVEEADDWLRYGNPWEKARPEYMLPVHFYGRVEHTPDGVKWLDTQVVLAMPYDTPVPGYKNNTVNTMRLWSAKAPNDFKLQDFNVGDYIEAVLDRNLAENISRVLYPNDNFFEGKELRLKQEYFVVAATLQDIIRRFKSSKFGCRDPVRTCFETFPDKVAIQLNDTHPALSIPELMRILVDVEKVDWDKAWEITKKTCAYTNHTVLPEALERWPVSMFEKLLPRHLEIIYAINQRHLDHVAALFPGDVDRLRRMSVIEEGDCKRINMAHLCVIGSHAVNGVARIHSEIVKQSVFKDFYELEPEKFQNKTNGITPRRWLLLCNPGLADTIVEKIGEEFLTDLSQLKKLLPLVSDEVFIRDVAKVKQENKLKFSAFLEKEYKVKINPSSMFDVHVKRIHEYKRQLLNCLHVVTLYNRIKRDPAKAFVPRTVMIGGKAAPGYHMAKLIIKLVTSIGDVVNHDPVVGDRLKVIFLENYRVSLAEKVIPAADLSQQISTAGTEASGTGNMKFMLNGALTIGTMDGANVEMAEEAGAENLFIFGLRVEDVEALDRKGYNAREYYDHLPELKQAVDQISSGFFSPKEPDCFKDIVNMLMHHDRFKVFADYEAYMQCQAQVDQLYRNPKEWTKKVIRNIACSGKFSSDRTITEYAREIWGVEPSDLQIPPPNIPRDXAHPALAGPAGICFLADFAPPFFPKHFASHWWSLLF

SEQ ID NO: 1189 - protein, 251 aa, Homo Sapiens
  misc_feature (245)..(245): Xaa can be any naturally occurring amino acid
MAAAAAAGEARRVLVYGGRGALGSRCVQAFRARNWWVASVDVVENEEASATIIVKMTDSFTEQADQVTAEVGKLLGEEKVDAILCVAGGWAGGNAKSKSLFKNCDLMWKQSIWTSTISSHLATKHLKEGGLLTLAGAKAALDGTPGMIGYGMAKGAVHQLCQSLAGKNSGMPPGAAAIAVLPVTLDTPMNRKSMPEADFSSWTPLEFLVETFHDWITGKNRPSSGSLIQVVTTEGRTELTPAYFXASSQCL

SEQ ID NO: 1190 - protein, 235 aa, Homo Sapiens
  misc_feature (202)..(202): Xaa can be any naturally occurring amino acid
MARDYDHLFKLLIIGDSGVGKSSLLLRFADNTFSGSYITTIGVDFKIRTVEINGEKVKLQIWDTAGQERFRTITSTYYRGTHGVIVVYDVTSAESFVNVKRWLHEINQNCDDVCRILVGNKNDDPERKVVETEDAYKFAGQMGIQLFETSAKENVNVEEMFNCITELVLRAKKDNLAKQQQQQQNDVVKLTKNSKRKKRCCXWHPVHCRDCTAVPPPARGPRRFLGGQSQFRAVI

SEQ ID NO: 1191 - protein, 1297 aa, Homo Sapiens
  misc_feature (1288)..(1288): Xaa can be any naturally occurring amino acid
MSGGGGGGGSAPSRFADYFVICGLDTETGLEPDELSALCQYIQASKARDGASPFISSTTEGENFEQTPLRRTFKSKVLARYPENVEWNPFDQDAVGMLCMPKGLAFKTQADPREPQFHAFIITREDGSRTFGFALTFYEEVTSKQICSAMQTLYHMHNAEYDVLHAPPADDRDQSSMEDGEDTPVTKLQRFNSYDISRDTLYVSKCICLITPMSFMKACRSVLEQLHQAVTSPQPPPLPLESYIYNVLYEVPLPPPGRSLKFSGVYGPIICQRPSTNELPLFDFPVKEVFELLGVENVFQLFTCALLEFQILLYSQHYQRLMTVAETITALMFPFQWQHVYVPILPASLLHFLDAPVPYLMGLHSNGLDDRSKLELPQEANLCFVDIDNHFIELPEDLPQFPNKLEFVQEVSEILMAFGIPPEGNLHCSESASKLKRLRASELVSDKRNGNIAGSPLHSYELLKENETIARLQALVKRTGVSLEKLEVREDPSSNKDLKVQCDEEELRIYQLNIQIREVFANRFTQMFADYEVFVIQPSQDKESWFTNREQMQNFDKASFLSDQPEPYLPFLSRFLETQMFASFIDNKIMCHDDDDKDPVLRVFDSRVDKIRLLNVRTPTLRTSMYQKCTTVDEAEKAIELRLAKIDHTAIHPHLLDMKIGQGKYEPGFFPKLQSDVLSTGPASNKWTKRNAPAQWRRKDRQKQHTEHLRLDNDQREKYIQEARTMGSTIRQPKLSNLSPSVIAQTNWKFVEGLLKECRNKTKRMLVEKMGREAVELGHGEVNITGVEENTLIASLCDLLERIWSHGLQVKQGKSALWSHLLHYQDNRQRKLTSGSLSTSGILLDSERRKSDASSLMPPLRISLIQDMRHIQNIGEIKTDVGKARAWVRLSMEKKLLSRHLKQLLSDHELTKKLYKRYAFLRCDDEKEQFLYHLLSFNAVDYFCFTNVFTTILIPYHILIVPSKKLGGSMFTANPWICISGELGETQIMQIPRNVLEMTFECQNLGKLTTVQIGHDNSGLYAKWLVEYVMVRNEITGHTYKFPCGRWLGKGMDDGSLERILVGELLTSQPEVDERPCRTPPLQQSPSVIRRLVTISPNNKPKLNTGQIQESIGEAVNGIVKHFHKPEKERGSLTLLLCGECGLVSALEQAFQHGFKSPRLFKNVFIWDFLEKAQTYYETLEKNEVVPEENWHTRARNFCRFVTAINNTPRNIGKDGKFQMLVCLGARDHLLHHWIALLADCPITAHMYEDVALIKDHTLVNSLIRVLQTLQEFNITLETSLVKGIDIXPPSTSQQQD

SEQ ID NO: 1192 - protein, 577 aa, Homo Sapiens
  misc_feature (568)..(568): Xaa can be any naturally occurring amino acid
MHGRLKVKTSEEQAEAKRLEREQKLKLYQSATQAVFQKRQAGELDESVLELTSQILGANPDFATLWNCRREVLQQLETQKSPEELAALVKAELGFLESCLRVNPKSYGTWHHRCWLLGRLPEPNWTRELELCARFLEVDERNFHCWDYRRFVATQAAVPPAEELAFTDSLITRNFSNYSSWHYRSCLLPQLHPQPDSGPQGRLPEDVLLKELELVQNAFFTDPNDQSAWFYHRWLLGRADPQDALRCLHVSRDEACLTVSFSRPLLVGSRMEILLLMVDDSPLIVEWRTPDGRNRPSHVWLCDLPAASLNDQLPQHTFRVIWTAGDVQKECVLLKGRQEGWCRDSTTDEQLFRCELSVEKSTVLQSELESCKELQELEPENKWCLLTIILLMRALDPLLYEKETLQYFQTLKAVDPMRATYLDDLRSKFLLENSVLKMEYAEVRVLHLAHKDLTVLCHLEQLLLVTHLDLSHNRLRTLPPALAALRCLEVLQASDNAIESLDGVTNLPRLQELLLCNNRLQQPAVLQPLASCPRLVLLNLQGNPLCQAVGILEQLAELLPSVSSVLTXEALPPTLAL

SEQ ID NO: 1193 - protein, 675 aa, Homo Sapiens
  misc_feature (671)..(671): Xaa can be any naturally occurring amino acid
MNQVTDWVDPSFDDFLECSGVSTITATSLGVNNSSHRRKNGPSTLESSRFPARKRGNLSSLEQIYGLENSKEYLSENEPWVDKYKPETQHELAVHKKKIEEVETWLKAQVLERQPKQGGSILLITGPPGCGKTTTLKILSKEHGIQVQEWINPVLPDFQKDDFKGMFNTESSFHMFPYQSQIAVFKEFLLRATKYNKLQMLGDDLRTDKKIILVEDLPNQFYRDSHTLHEVLRKYVRIGRCPLIFIISDSLSGDNNQRLLFPKEIQEECSISNISFNPVAPTIMMKFLNRIVTIEANKNGGKITVPDKTSLELLCQGCSGDIRSAINSLQFSSSKGENNLRPRKKGMSLKSDAVLSKSKRRKKPDRVFENQEVQAIGGKDVSLFLFRALGKILYCKRASLTELDSPRLPSHLSEYERDTLLVEPEEVVEMSHMPGDLFNLYLHQNYIDFFMEIDDIVRASEFLSFADILSGDWNTRSLLREYSTSIATRGVMHSNKARGYAHCQGGGSSFRPLHKPQWFLINKKYRENCLAAKALFPDFCLPALCLQTQLLPYLALLTIPMRNQAQISFIQDIGRLPLKRHFGRLKMEALTDREHGMIDPDSGDEAQLNGGHSAEESLGEPTQATVPETWSLPLSQNSASELPASQPQPFSAQGDMEENIIIEDYESDGTXKPAC

SEQ ID NO: 1194 - protein, 641 aa, Homo Sapiens
  misc_feature (632)..(632): Xaa can be any naturally occurring amino acid
MFYAHFVLSKRGPLAKIWLAAHWDKKLTKAHVFECNLESSVESIISPKVKMALRTSGHLLLGVVRIYHRKAKYLLADCNEAFIKIKMAFRPGVVDLPEENREAAYNAITLPEEFHDFDQPLPDLDDIDVAQQFSLNQSRVEEITMREEVGNISILQENDFGDFGMDDREIMREGSAFEDDDMLVSTTTSNLLLESEQSTSNLNEKINHLEYEDQYKDDNFGEGNDGGILDDKLISNNDGGIFDDPPALSEAGVMLPEQPAHDDMDEDDNVSMGGPDSPDSVDPVEPMPTMTDQTTLVPNEEEAFALEPIDITVKETKAKRKRKLIVDSVKELDSKTIRAQLSDYSDIVTTLDLAPPTKKLMMWKETGGVEKLFSLPAQPLWNNRLLKLFTRCLTPLVPEDLRKRRKGGEADNLDEFLKEFENPEVPREDQQQQHQQRDVIDEPIIEEPSRLQESVMEASRTNIDESAMPPPPPQGVKRKAGQIDPEPVMPPQQVEQMEIPPVELPPEEPPNICQLIPELELLPEKEKEKEKEKEDDEEEEDEDASGGDQDQEERRWNKRTQQMLHGLQRALAKTGAESISLLELCRNTNRKQAAAKFYSFLVLKKQQAIELTQEEPYSDIIATPGPRFHIIXGARSIIASV

SEQ ID NO: 1195 - protein, 1027 aa, Homo Sapiens
  misc_feature (981)..(981): Xaa can be any naturally occurring amino acid
MKSLKAKFRKSDTNEWNKNDDRLLQAVENGDAEKVASLLGKKGASATKHDSEGKTAFHLAAAKGHVECLRVMITHGVDVTAQDTTGHSALHLAAKNSHHECIRRLLQSKCPAESVDSSGKTALHYAAAQGCLQAVQILCEHKSPINLKDLDGNIPLLLAVQNGHSEICHFLLDHGADVNSRNKSGRTALMLACEIGSSNAVEALIKKGADLNLVDSLGYNALHYSKLSENAGIQSLLLSKISQDADLKTPTKPKQHDQVSKISSERSGTPKTRKAPPPPISPTQLSDVSSPRSITSTPLSGKESVFFAEPPFKAEISSIRENKDRLSDSTTGADSLLDISSEADQQDLLSLLQAKVASLTLHNKELQDKLQAKSPKEAEADLSFDSYHSTQTDLGPSLGKPGETSPPDSKSSPSVLIHSLGKSTTDNDVRIQQLQEILQDLQKRLESSEAERKQLQVELQSRRAELVCLNNTEISENSSDLSQKLKETQSKYEEAMKEVLSVQKQMKLGLVSPESMDNYSHFHELRVTEEEINVLKQDLQNALEESERNKEKVRELEEKLVEREKGTVIKPPVEEYEEMKSSYCSVIENMNKEKAFLFEKYQEAQEEIMKLKDTLKSQMTQEASDEAEDMKEAMNRMIDELNKQVSELSQLYKEAQAELEDYRKRKSLEDVTAEYIHKAEHEKLMQLTNVSRAKAEDALSEMKSQYSKVLNELTQLKQLVDAQKENSVSITEHLQVITTLRTAAKEMEEKISNLKEHLASKEVEVAKLEKQLLEEKAAMTDAMVPRSSYEKLQSSLESEVSVLASKLKESVKEKEKVHSEVVQIRSEVSQVKREKENIQTLLKSKEQEVNELLQKFQQAQEELAEMKRYAESSSKLEEDKDKKINEMSKEVTKLKEALNSLSQLSYSTSSSKRQSQQLEALQQQVKQLQNQLAECKKQHQEVISVYRMHLLYAVQGQMDEDVQKVLKQILTMCKNQSQKKXSGFLGRTLPLVICLCVRSRVVGSRCHCSHSWYALWPSVASSLSKGF

SEQ ID NO: 1196 - protein, 3230 aa, Homo Sapiens
  misc_feature (3225)..(3225): Xaa can be any naturally occurring amino acid
MRRSKADVERYIASVQGSTPSPRQKSMKGFYFAKLYYEAKEYDLAKKYICTYINVQERDPKAHRFLGLLYELEENTDKAVECYRRSVELNPTQKDLVLKIAELLCKNDVTDGRAKYWLERAAKLFPGSPAIYKLKEQLLDCEGEDGWNKLFDLIQSELYVRPDDVHVNIRLVEVYRSTKRLKDAVAHCHEAERNIALRSSLEWNSCVVQTLKEYLESLQCLESDKSDWRATNTDLLLAYANLMLLTLSTRDVQESRELLQSFDSALQSVKSLGGNDELSATFLEMKGHFYMHAGSLLLKMGQHSSNVQWRALSELAALCYLIAFQVPRPKIKLIKGEAGQNLLEMMACDRLSQSGHMLLNLSRGKQDFLKEIVETFANKSGQSALYDALFSSQSPKDTSFLGSDDIGNIDVREPELEDLTRYDVGAIRAHNGSLQHLTWLGLQWNSLPALPGIRKWLKQLFHHLPHETSRLETNAPESICILDLEVFLLGVVYTSHLQLKEKCNSHHSSYQPLCLPLPVCKQLCTERQKSWWDAVCTLIHRKAVPGNVAKLRLLVQHEINTLRAQEKHGLQPALLVHWAECLQKTGSGLNSFYDQREYIGRSVHYWKKVLPLLKIIKKKNSIPEPIDPLFKHFHSVDIQASEIVEYEEDAHITFAILDAVNGNIEDAVTAFESIKSVVSYWNLALIFHRKAEDIENDALSPEEQEECKNYLRKTRDYLIKIIDDSDSNLSVVKKLPVPLESVKEMLNSVMQELEDYSEGGPLYKNGSLRNADSEIKHSTPSPTRYSLSPSKSYKYSPKTPPRWAEDQNSLLKMICQQVEAIKKEMQELKLNSSNSASPHRWPTENYGPDSVPDGYQGSQTFHGAPLTVATTGPSVYYSQSPAYNSQYLLRPAANVTPTKGPVYGMNRLPPQQHIYAYPQQMHTPPVQSSSACMFSQEMYGPPALRFESPATGILSPRGDDYFNYNVQQTSTNPPLPEPGYFTKPPIAAHASRSAESKTIEFGKTNFVQPMPGEGLRPSLPTQAHTTQPTPFKFNSNFKSNDGDFTFSSPQVVTQPPPAAYSNSESLLGLLTSDKPLQGDGYSGAKPIPGGQTIGPRNTFNFGSKNVSGISFTENMGSSQQKNSGFRRSDDMFTFHGPGKSVFGTPTLETANKNHETDGGSAHGDDDDDGPHFEPVVPLPDKIEVKTGEEDEEEFFCNRAKLFRFDVESKEWKERGIGNVKILRHKTSGKIRLLMRREQVLKICANHYISPDMKLTPNAGSDRSFVWHALDYADELPKPEQLAIRFKTPEEAALFKCKFEEAQSILKAPGTNVAMASNQAVRIVKEPTSHDNKDICKSDAGNLNFEFQVAKKEGSWWHCNSCSLKNASTAKKCVSCQNLNPSNKELVGPPLAETVFTPKTSPENVQDRFALVTPKKEGHWDCSICLVRNEPTVSRCIACQNTKSANKSGSSFVHQASFKFGQGDLPKPINSDFRSVFSTKEGQWDCSACLVQNEGSSTKCAACQNPRKQSLPATSIPTPASFKFGTSETSKTLKSGFEDMFAKKEGQWDCSSCLVRNEANATRCVACQNPDKPSPSTSVPAPASFKFGTSETSKAPKSGFEGMFTKKEGQWDCSVCLVRNEASATKCIACQNPGKQNQTTSAVSTPASSETSKAPKSGFEGMFTKKEGQWDCSVCLVRNEASATKCIACQNPGKQNQTTSAVSTPASSETSKAPKSGFEGMFTKKEGQWDCSVCLVRNEASATKCIACQCPSKQNQTTAISTPASSEISKAPKSGFEGMFIRKGQWDCSVCCVQNESSSLKCVACDASKPTHKPIAEAPSAFTLGSEMKLHDSSGSQVGTGFKSNFSEKASKFGNTEQGFKFGHVDQENSPSFMFQGSSNTEFKSTKEGFSIPVSADGFKFGISEPGNQEKKSEKPLENGTGFQAQDISGQKNGRGVIFGQTSSTFTFADLAKSTSGEGFQFGKKDPNFKGFSGAGEKLFSSQYGKMANKANTSGDFEKDDDAYKTEDSDDIHFEPVVQMPEKVELVTGEEDEKVLYSQRVKLFRFDAEVSQWKERGLGNLKILKNEVNGKLRMLMRREQVLKVCANHWITTTMNLKPLSGSDRAWMWLASDFSDGDAKLEQLAAKFKTPELAEEFKQKFEECQRLLLDIPLQTPHKLVDTGRAAKLIQRAEEMKSGLKDFKTFLTNDQTKVTEEENKGSGTGAAGASDTTIKPNPENTGPTLEWDNYDLREDALDDSVSSSSVHASPLASSPVRKNLFRFGESTTGFNFSFKSALSPSKSPAKLNQSGTSVGTDEESDVTQEEERDGQYFEPVVPLPDLVEVSSGEENEQVVFSHRAKLYRYDKDVGQWKERGIGDIKILQNYDNKQVRIVMRRDQVLKLCANHRITPDMTLQNMKGTERVWLWTACDFADGERKVEHLAVRFKLQDVADSFKKIFDEAKTAQEKDSLITPHVSRSSTPRESPCGKIAVAVLEETTRERTDVIQGDDVADATSEVEVSSTSETTPKAVVSPPKFVFGSESVKSIFSSEKSKPFAFGNSSATGSLFGFSFNAPLKSNNSETSSVAQSGSESKVEPKKCELSKNSDIEQSSDSKVKNLFASFPTEESSINYTFKTPEKAKEKKKPEDSPSDDDVLIVYELTPTAEQKALATKLKLPPTFFCYKNRPDYVSEEEEDDEDFETAVKKLNGKLYLDGSEKCRPLEENTADNEKECIIVWEKKPTVEEKAKADTLKLPPTFFCGVCSDTDEDNGNGEDFQSELQKVQEAQKSQTEEITSTTDSVYTGGTEVMVPSFCKSEEPDSITKSISSPSVSSETMDKPVDLSTRKEIDTDSTSQGESKIVSFGFGSSTGLSFADLASSNSGDFAFGSKDKNFQWANTGAAVFGTQSVGTQSAGKVGEDEDGSDEEVVHNEDIHFEPIVSLPEVEVKSGEEDEEILFKERAKLYRWDRDVSQWKERGVGDIKILWHTMKNYYRILMRRDQVFKVCANHVITKTMELKPLNVSNNALVWTASDYADGEAKVEQLAVRFKTKEVADCFKKTFEECQQNLMKLQKGHVSLAAELSKETNPVVFFDVCADGEPLGRITMELFSNIVPRTAENFRALCTGEKGFGFKNSIFHRVIPDFVCQGGDITKHDGTGGQSIYGDKFEDENFDVKHTGPGLLSMANQGQNTNNSQFVITLKKAEHLDFKHVVFGFVKDGMDTVKKIESFGSPKGSVCRRITITECGQIXNHCCS

SEQ ID NO: 1197 - protein, 185 aa, Homo Sapiens
  misc_feature (136)..(136): Xaa can be any naturally occurring amino acid
MPVDFTGYWKMLVNENFEEYLRALDVNVALRKIANLLKPDKEIVQDGDHMIIRTLSTFRNYIMDFQVGKEFEEDLTGIDDRKCMTTVSWDGDKLQCVQKGEKEGRGWTQWIEGDELHLEMRVEGVVCKQVFKKVQXGPSRQPCPNQSAGCVSQDPSLHSMRQKCPATPRHLLAESVSWLCHFSFS

SEQ ID NO: 1198 - protein, 324 aa, Homo Sapiens
  misc_feature (318)..(318): Xaa can be any naturally occurring amino acid
MRLGPRTAALGLLLLCAAAAGAGKAEELHYPLGERRSDYDREALLGVQEDVDEYVKLGHEEQQKRLQAIIKKIDLDSDGFLTESELSSWIQMSFKHYAMQEAKQQFVEYDKNSDDTVTWDEYNIQMYDRVIDFDENTALDDAEEESFRKLHLKDKKRFEKANQDSGPGLSLEEFIAFEHPEEVDYMTEFVIQEALEEHDKNGDGFVSLEEFLGDYRWDPTANEDPEWILVEKDRFVNDYDKDNDGRLDPQELLPWVVPNNQGIAQEEALHLIDEMDLNGDKKLSEEEILENPDLFLTSEATDYGRQLHDDYFYHDELXSPSLSQ

SEQ ID NO: 1199 - protein, 193 aa, Homo Sapiens
  misc_feature (176)..(176): Xaa can be any naturally occurring amino acid
MLPPMALPSVSWMLLSCLMLLSQVQGEEPQRELPSARIRCPKGSKAYGSHCYALFLSPKSWTDADLACQKRPSGNLVSVLSGAEGSFVSSLVKSIGNSYSYVWIGLHDPTQGTEPNGEGWEWSSSDVMNYFAWERNPSTISSPGHCASLSRSTAFLRWKDYNCNVRLPYVCKFTDXCRREVSSLCLVCNSSWA

SEQ ID NO: 1200 - protein, 427 aa, Homo Sapiens
  misc_feature (407)..(407): Xaa can be any naturally occurring amino acid
MDGWRRMPRWGLLLLLWGSCTFGLPTDTTTFKRIFLKRMPSIRESLKERGVDMARLGPEWSQPMKRLTLGNTTSSVILTNYMDTQYYGEIGIGTPPQTFKVVFDTGSSNVWVPSSKCSRLYTACVYHKLFDASDSSSYKHNGTELTLRYSTGTVSGFLSQDIITVGGITVTQMFGEVTEMPALPFMLAEFDGVVGMGFIEQAIGRVTPIFDNIISQGVLKEDVFSFYYNRDSENSQSLGGQIVLGGSDPQHYEGNFHYINLIKTGVWQIQMKGVSVGSSTLLCEDGCLALVDTGASYISGSTSSIEKLMEALGAKKRLFDYVVKCNEGPTLPDISFHLGGKEYTLTSADYVFQESYSSKKLCTLAIHAMDIPPPTGPTWALGATFIRKFYTEFDRRNNRIGFALARXGPLPPRQALPSALAQSWNTL

SEQ ID NO: 1201 - protein, 585 aa, Homo Sapiens
  misc_feature (579)..(579): Xaa can be any naturally occurring amino acid
MGCGLNKLEKRDEKRPGNIYSTLKRPQVETKIDVSYEYRFLEFTTLSAAELPGSSAVRLASLRDLPAQLLELYQQGFSLAALHPFVQPTHEREKTPLEHIFRAILIKKTDRSQKTDLHNEGYILELDCCSSLDHPTDQKLIPEFIKKIQEAASQGLKFVGVIPQYHSSVNSAGSSAPVSTANSTEDARDAKNARGDHASLENEKPGTGDVCSAPAGRNQSPEPSSGPRGEVPLAKQPSSPSGEGDGGELSPQGVSKTLDGPESNPLEVHEEPLSGKMEIFTLFNKPKSHQKCRQYYPVTIPLHVSKNGQTVSGLDANWLEHMSDHFRKGGMLVNAVFYLGIVNDSLHGLTDGVFIFEAVSTEDSKTIQGYDAIVVEQWTVLEGVEVQTDYVPLLNSLAAYGWQLTCVLPTPVVKTTSEGSVSTKQIVFLQRPCLPQKIKKKESKFQWRFSREEMHNRQMRKSKGKLSARDKQQAEENEKNLEDQSSKAGDMGNCVSGQQQEGGVSEEMKGPVQEDKGEQLSPGGLLCGVGVEGEAVQNGPASHSRALVGICTGHSNPGEDARDGDAEEVRELGTVEENXVLGNLC

SEQ ID NO: 1202 - protein, 238 aa, Homo Sapiens
  misc_feature (212)..(212): Xaa can be any naturally occurring amino acid
MQSAMFLAVQHDCRPMDKSAGSGHKSEEKREKMKRTLLKDWKTRLSYFLQNSSTPGKPKTGKKSKQQAFIKPSPEEAQLWSEAFDELLASKYGLAAFRAFLKSEFCEENIEFWLACEDFKKTKSPQKLSSKARKIYTDFIEKEAPKEINIDFQTKTLIAQNIQEATSGCFTTAQKRVYSLMENNSYPRFLESEFYQDLCKKPQITTEPHATXNVKGSPEMEDISFFFLRGRTVTCHKD

SEQ ID NO: 1203 - protein, 368 aa, Homo Sapiens
  misc_feature (365)..(365): Xaa can be any naturally occurring amino acid
MAASGPGCRSWCLCPEVPSATFFTALLSLLVSGPRLFLLQQPLAPSGLTLKSEALRNWQVYRLVTYIFVYENPISLLCGAIIIWRFAGNFERTVGTVRHCFFTVIFAIFSAIIFLSFEAVSSLSKLGEVEDARGFTPVAFAMLGVTTVRSRMRRALVFGMVVPSVLVPWLLLGASWLIPQTSFLSNVCGLSIGLAYGLTYCYSIDLSERVALKLDQTFPFSLMRRISVFKYVSGSSAERRAAQSRKLNPVPGSYPTQSCHPHLSPSHPVSQTQHASGQKLASWPSCTPGHMPTLPPYQPASGLCYVQNHFGPNPTSSSVYPASAGTSLGIQPPTPVNSPGTVYSGALGTPGAAGSKESSRVPMPXENF

SEQ ID NO: 1204 - protein, 227 aa, Homo Sapiens
  misc_feature (224)..(224): Xaa can be any naturally occurring amino acid
MLGVTTVRSRMRRALVFGMVVPSVLVPWLLLGASWLIPQTSFLSNVCGLSIGLAYGLTYCYSIDLSERVALKLDQTFPFSLMRRISVFKYVSGSSAERRAAQSRKLNPVPGSYPTQSCHPHLSPSHPVSQTQHASGQKLASWPSCTPGHMPTLPPYQPASGLCYVQNHFGPNPTSSSVYPASAGTSLGIQPPTPVNSPGTVYSGALGTPGAAGSKESSRVPMPXENF

SEQ ID NO: 1205 - protein, 399 aa, Homo Sapiens
  misc_feature (349)..(349): Xaa can be any naturally occurring amino acid
MNGTEGPNFYVPFSNATGVVRSPFEYPQYYLAEPWQFSMLAAYMFLLIVLGFPINFLTLYVTVQHKKLRTPLNYILLNLAVADLFMVLGGFTSTLYTSLHGYFVFGPTGCNLEGFFATLGGEIALWSLVVLAIERYVVVCKPMSNFRFGENHAIMGVAFTWVMALACAAPPLAGWSRYIPEGLQCSCGIDYYTLKPEVNNESFVIYMFVVHFTIPMIIIFFCYGQLVFTVKEAAAQQQESATTQKAEKEVTRMVIIMVIAFLICWVPYASVAFYIFTHQGSNFGPIFMTIPAFFAKSAAIYNPVIYIMMNKQFRNCMLTTICCGKNPLGDDEASATVSKTETSQVAPAXDLPRTLWPTIGVSHPLHLPPATAIPPGAAPVQNERSHIGSLIFFFFLRNN

SEQ ID NO: 1206 - protein, 206 aa, Homo Sapiens
  misc_feature (161)..(161): Xaa can be any naturally occurring amino acid
MVPKLFTSQICLLLLLGLMGVEGSLHARPPQFTRAQWFAIQHISLNPPRCTIAMRAINNYRWRCKNQNTFLRTTFANVVNVCGNQSIRCPHNRTLNNCHRSRFRVPLLHCDLINPGAQNISNCTYADRPGRRFYVVACDNRDPRDSPRYPVVPVHLDTTIXAPVSAVLIITHLPSSSIIAKIPSLHVLWVSATVLISLHTPSAFLS

SEQ ID NO: 1207 - protein, 363 aa, Homo Sapiens
  misc_feature (293)..(293): Xaa can be any naturally occurring amino acid
MTTTRYRPTWDLALDPLVSCKLCLGEYPVEQMTTIAQCQCIFCTLCLKQYVELLIKEGLETAISCPDAACPKQGHLQENEIECMVAAEIMQRYKKLQFEREVLFDPCRTWCPASTCQAVCQLQDVGLQTPQPVQCKACRMEFCSTCKASWHPGQGCPETMPITFLPGETSAAFKMEEDDAPIKRCPKCKVYIERDEGCAQMMCKNCKHAFCWYCLESLDDDFLLIHYDKGPCRNKLGHSRASVIWHRTQVVGIFAGFGLLLLVASPFLLLATPFVLCCKCKCSKGDDDPLPTXRKRDAGTHPCLREVWLSPNPPHRPPFTKHLSCLMCPIELHSVRLDAVISGTYVTMFAEAPGVVGRGGRCG

SEQ ID NO: 1208 - protein, 1358 aa, Homo Sapiens
  misc_feature (1355)..(1355): Xaa can be any naturally occurring amino acid
MSTGDSFETRFEKMDNLLRDPKSEVNSDCLLDGLDALVYDLDFPALRKNKNIDNFLSRYKDTINKIRDLRMKAEDYEVVKVIGRGAFGEVQLVRHKSTRKVYAMKLLSKFEMIKRSDSAFFWEERDIMAFANSPWVVQLFYAFQDDRYLYMVMEYMPGGDLVNLMSNYDVPEKWARFYTAEVVLALDAIHSMGFIHRDVKPDNMLLDKSGHLKLADFGTCMKMNKEGMVRCDTAVGTPDYISPEVLKSQGGDGYYGRECDWWSVGVFLYEMLVGDTPFYADSLVGTYSKIMNHKNSLTFPDDNDISKEAKNLICAFLTDREVRLGRNGVEEIKRHLFFKNDQWAWETLRDTVAPVVPDLSSDIDTSNFDDLEEDKGEEETFPIPKAFVGNQLPFVGFTYYSNRRYLSSANPNDNRTSSNADKSLQESLQKTIYKLEEQLHNEMQLKDEMEQKCRTSNIKLDKIMKELDEEGNQRRNLESTVSQIEKEKMLLQHRINEYQRKAEQENEKRRNVENEVSTLKDQLEDLKKVSQNSQLANEKLSQLQKQLEEANDLLRTESDTAVRLRKSHTEMSKSISQLESLNRELQERNRILENSKSQTDKDYYQLQAILEAERRDRGHDSEMIGDLQARITSLQEEVKHLKHNLEKVEGERKEAQDMLNHSEKEKNNLEIDLNYKLKSLQQRLEQEVNEHKVTKARLTDKHQSIEEAKSVAMCEMEKKLKEEREAREKAENRVVQIEKQCSMLDVDLKQSQQKLEHLTGNKERMEDEVKNLTLQLEQESNKRLLLQNELKTQAFEADNLKGLEKQMKQEINTLLEAKRLLEFELAQLTKQYRGNEGQMRELQDQLEAEQYFSTLYKTQVKELKEEIEEKNRENLKKIQELQNEKETLATQLDLAETKAESEQLARGLLEEQYFELTQESKKAASRNRQEITDKDHTVSRLEEANSMLTKDIEILRRENEELTEKMKKAEEEYKLEKEEEISNLKAAFEKNINTERTLKTQAVNKLAEIMNRKDFKIDRKKANTQDLRKKEKENRKLQLELNQEREKFNQMVVKHQKELNDMQAQLVEECAHRNELQMQLASKESDIEQLRAKLLDLSDSTSVASFPSADETDGNLPESRIEGWLSVPNRGNIKRYGWKKQYVVVSSKKILFYNDEQDKEQSNPSMVLDIDKLFHVRPVTQGDVYRAETEEIPKIFQILYANEGECRKDVEMEPVQQAEKTNFQNHKGHEFIPTLYHFPANCDACAKPLWHVFKPPPALECRRCHVKCHRDHLDKKEDLICPCKVSYDVTSARDMLLLACSQDEQKKWVTHLVKKIPKNPPSGFVRASPRTLSTRSTANQSFRKVVKNTSGKTSXPCD

SEQ ID NO: 1209 - protein, 382 aa, Homo Sapiens
  misc_feature (352)..(352): Xaa can be any naturally occurring amino acid
MAPVLPLVLPLQPRIRLAQGLWLLSWLLALAGGVILLCSGHLLVQLRHLGTFLAPSCQFPVLPQAALAAGAVALGTGLVGVGASRASLNAALYPPWRGVLGPLLVAGTAGGGGLLVVALGLALALPGSLDEALEEGLVTALAHYKDTEVPGHCQAKRLVDELQLRYHCCGRHGYKDWFGVQWVSSRYLDPGDRDVADRIQSNVEGLYLTDGVPFSCCNPHSPRPCLQNRLSDSYAHPLFDPRQPNQNLWAQGCHEVLLEHLQDLAGTLGSMLAVTFLLQALVLLGLRYLQTALEGLGGVIDAGGETQGYLFPSGLKDMLKTAWLQGGVACRPAPEEAPPGEAPPKEDLSEAXRPGAWGEEEGGMDKSENLTTPYQGSRLGGS

SEQ ID NO: 1210 - protein, 129 aa, Homo Sapiens
  misc_feature (124)..(124): Xaa can be any naturally occurring amino acid
MAKIKARDLRGKKKEELLKQLDDLKVELSQLRVAKVTGGAASKLSKIRVVRKSIARVLTVINQTQKENLRKFYKGKKYKPLDLRPKKTRAMRRRLNKHEENLKTKKQQRKERLYPLRKYAVKAXGAHCQ

SEQ ID NO: 1211 - protein, 279 aa, Homo Sapiens
  misc_feature (267)..(267): Xaa can be any naturally occurring amino acid
MPKGKKAKGKKVAPAPAVVKKQEAKKVVNPLFEKRPKNFGIGQDIQPKRDLTRFVKWPRYIRLQRQRAILYKRLKVPPAINQFTQALDRQTATQLLKLAHKYRPETKQEKKQRLLARAEKKAAGKGDVPTKRPPVLRAGVNTVTTLVENKKAQLVVIAHDVDPIELVVFLPALCRKMGVPYCIIKGKARLGRLVHRKTCTTVAFTQVNSEDKGALAKLVEAIRTNYNDRYDEIRRHWGGNVLGPKSVARIAKLEKAKAKELATKLGXMYTVEFSVHKNN

SEQ ID NO: 1212 - protein, 630 aa, Homo Sapiens
  misc_feature (608)..(608): Xaa can be any naturally occurring amino acid
MEAPAAGLFLLLLLGTWAPAPGSASSEAPPLINEDVKRTVDLSSHLAKVTAEVVLAHLGGGSTSRATSFLLALEPELEARLAHLGVQVKGEDEEENNLEVRETKIKGKSGRFFTVKLPVALDPGAKISVIVETVYTHVLHPYPTQITQSEKQFVVFEGNHYFYSPYPTKTQTMRVKLASRNVESYTKLGNPTRSEDLLDYGPFRDVPAYSQDTFKVHYENNSPFLTITSMTRVIEVSHWGNIAVEENVDLKHTGAVLKGPFSRYDYQRQPDSGISSIRSFKTILPAAAQDVYYRDEIGNVSTSHLLILDDSVEMEIRPRFPLFGGWKTHYIVGYNLPSYEYLYNLGDQYALKMRFVDHVFDEQVIDSLTVKIILPEGAKNIEIDSPYEISRAPDELHYTYLDTFGRPVIVAYKKNLVEQHIQDIVVHYTFNKVLMLQEPLLVVAAFYILFFTVIIYVRLDFSITKDPAAEARMKVACITEQVLTLVNKRIGLYRHFDETVNRYKQSRDISTLNSGKKSLETEHKALTSEIALLQSRLKTEGSDLCDRVSEMQKLDAQVKELVLKSAVEAERLVAGKLKKDTYIENEKLISGKRQELVTKIDHILDALXPLPASSRGPRVPALCCGRQIGW

SEQ ID NO: 1213 - protein, 549 aa, Homo Sapiens
  misc_feature (526)..(526): Xaa can be any naturally occurring amino acid
MRRRRRRDGFYPAPDFRDREAEDMAGVFDIDLDQPEDAGSEDELEEGGQLNESMDHGGVGPYELGMEHCEKFEISETSVNRGPEKIRPECFELLRVLGKGGYGKVFQVRKVTGANTGKIFAMKVLKKAMIVRNAKDTAHTKAERNILEEVKHPFIVDLIYAFQTGGKLYLILEYLSGGELFMQLEREGIFMEDTACFYLAEISMALGHLHQKGIIYRDLKPENIMLNHQGHVKLTDFGLCKESIHDGTVTHTFCGTIEYMAPEILMRSGHNRAVDWWSLGALMYDMLTGAPPFTGENRKKTIDKILKCKLNLPPYLTQEARDLLKKLLKRNAASRLGAGPGDAGEVQAHPFFRHINWEELLARKVEPPFKPLLQSEEDVSQFDSKFTRQTPVDSPDDSTLSESANQVFLGFTYVAPSVLESVKEKFSFEPKIRSPRRFIGSPRTPVSPVKFSPGDFWGRGASASTANPQTPVEYPMETSGIEQMDVTMSGEASAPLPIRQPNSGPYKKQAFPMISKRPEHLRMNLXQSNAFNEFKAKKVEREMCEHPAR

SEQ ID NO: 1214 - protein, 1339 aa, Homo Sapiens
  misc_feature (1298)..(1298): Xaa can be any naturally occurring amino acid
MGRSGKLPSGVSAKLKRWKKGHSSDSNPAICRHRQAARSRFFSRPSGRSDLTVDAVKLHNELQSGSLRLGKSEAPETPMEEEAELVLTEKSSGTFLSGLSDCTNVTFSKVQRFWESNSAAHKEICAVLAAVTEVIRSQGGKETETEYFAALMTTMEAVESPESLAAVAYLLNLVLKRVPSPVLIKKFSDTSKAFMDIMSAQASSGSTSVLRWVLSCLATLLRKQDLEAWGYPVTLQVYHGLLSFTVHPKPKIRKAAQHGVCSVLKGSEFMFEKAPAHHPAAISTAKFCIQEIEKSGGSKEATTTLHMLTLLKDLLPCFPEGLVKSCSETLLRVMTLSHVLVTACAMQAFHSLFHARPGLSTLSAELNAQIITALYDYVPSENDLQPLLAWLKVMEKAHINLVRLQWDLGLGHLPRFFGTAVTCLLSPHSQVLTAATQSLKEILKECVAPHMADIGSVTSSASGPAQSVAKMFRAVEEGLTYKFHAAWSSVLQLLCVFFEACGRQAHPVMRKCLQSLCDLRLSPHFPHTAALDQAVGAAVTSMGPEVVLQAVPLEIDGSEETLDFPRSWLLPVIRDHVQETRLGFFTTYFLPLANTLKSKAMDLAQAGSTVESKIYDTLQWQMWTLLPGFCTRPTDVAISFKGLARTLGMAISERPDLRVTVCQALRTLITKGCQAEADRAEVSRFAKNFLPILFNLYGQPVAAGDTPAPRRAVLETIRTYLTITDTQLVNSLLEKASEKVLDPASSDFTRLSVLDLVVALAPCADEAAISKLYSTIRPYLESKAHGVQKKAYRVLEEVCASPQGPGALFVQSHLEDLKKTLLDSLRSTSSPAKRPRLKCLLHIVRKLSAEHKEFITALIPEVILCTKEVSVGARKNAFALLVEMGHAFLRFGSNQEEALQCYLVLIYPGLVGAVTMVSCSILALTHLLFEFKGLMGTSTVEQLLENVCLLLASRTRDVVKSALGFIKVAVTVMDVAHLAKHVQLVMEAIGKLSDDMRRHFRMKLRNLFTKFIRKFGFELVKRLLPEEYHRVLVNIRKAEARAKRHRALSQAAVEEEEEEEEEEEPAQGKGDSIEEILADSEDEEDNEEEERSRGKEQRKLARQRSRAWLKEGGGDEPLNFLDPKVAQRVLATQPGPGRGRKKDHSFKVSADGRLIIREEADGNKMEEEEGAKGEDEEMADPMEDVIIRNKKHQKLKHQKEAEEEELEIPPQYQAGGSGIHRPVAKKAMPGAEYKAKKAKGDVKKKGRPDPYAYIPLNRSKLNRRKKMKLQGQFKGLVKAARRGSQVGHKNRRKDRRPXGPGPLGCPVVQSEALSAPRLPCHQLQVLKILAEPGLRMTWN

SEQ ID NO: 1215 - protein, 143 aa, Homo Sapiens
  misc_feature (131)..(131): Xaa can be any naturally occurring amino acid
MRLFTGIVFCSLVMGVTSESWRSFFKEALQGVGDMGRAYWDIMISNHQNSNRYLYARGNYDAAQRGPGGVWAAKLISRSRVYLQGLIDYYLFGNSSTVLEDSKSNEKAEEWGRSGKDPDRFRPDGLPKKYXASCSSALRETGL

SEQ ID NO: 1216 - protein, 417 aa, Homo Sapiens
  misc_feature (406)..(406): Xaa can be any naturally occurring amino acid
MAASGKTSKSEPNHVIFKKISRDKSVTIYLGNRDYIDHVSQVQPVDGVVLVDPDLVKGKKVYVTLTCAFRYGQEDIDVIGLTFRRDLYFSRVQVYPPVGAASTPTKLQESLLKKLGSNTYPFLLTFPDYLPCSVMLQPAPQDSGKSCGVDFEVKAFATDSTDAEEDKIPKKSSVRLLIRKVQHAPLEMGPQPRAEAAWQFFMSDKPLHLAVSLNKEIYFHGEPIPVTVTVTNNTEKTVKKIKAFVEQVANVVLYSSDYYVKPVAMEEAQEKVPPNSTLTKTLTLLPLLANNRERRGIALDGKIKHEDTNLASSTIIKEGIDRTVLGILVSYQIKVKLTVSGFLGELTSSEVATEVPFRLMHPQPEDPAKESYQDANLVFEEFARHNLKDAGEAEEGKRDKNDVDEXRCRLRMPENDL

SEQ ID NO: 1217 - protein, 261 aa, Homo Sapiens
  misc_feature (251)..(251): Xaa can be any naturally occurring amino acid
MSIFTPTNQIRLTNVAVVRMKRAGKRFEIACYKNKVVGWRSGVEKDLDEVLQTHSVFVNVSKGQVAKKEDLISAFGTDDQTEICKQILTKGEVQVSDKERHTQLEQMFRDIATIVADKCVNPETKRPYTVILIERAMKDIHYSVKTNKSTKQQALEVIKQLKEKMKIERAHMRLRFILPVNEGKKLKEKLKPLIKVIESEDYGQQLEIVCLIDPGCFREIDELIKKETKGKGSLEVLNLKDVEEGDEKFEXHPSISSPLKH

SEQ ID NO: 1218 - protein, 246 aa, Homo Sapiens
  misc_feature (212)..(212): Xaa can be any naturally occurring amino acid
MVSRMVSTMLSGLLFWLASGWTPAFAYSPRTPDRVSEADIQRLLHGVMEQLGIARPRVEYPAHQAMNLVGPQSIEGGAHEGLQHLGPFGNIPNIVAELTGDNIPKDFSEDQGYPDPPNPCPVGKTDDGCLENTPDTAEFSREFQLHQHLFDPEHDYPGLGKWNKKLLYEKMKGGERRKRRSVNPYLQGQRLDNVVAKKSVPHFSDEDKDPEXREDARRKPTLPVRPQHGLCARVNGVPVNDSMFLT

SEQ ID NO: 1219 - protein, 123 aa, Homo Sapiens
  misc_feature (105)..(105): Xaa can be any naturally occurring amino acid
MKLAALLGLCVALSCSSAAAFLVGSAKPVAQPVAALESAAEAGAGTLANPLGTLNPLKLLLSSLGIPVNHLIEGSQKCVAELGPQAVGAVKALKALLGALTVFGXAETGASTPEDKTLPTREG

SEQ ID NO: 1220 - protein, 290 aa, Homo Sapiens
  misc_feature (277)..(277): Xaa can be any naturally occurring amino acid
MDSSREPTLGRLDAAGFWQVWQRFDADEKGYIEEKELDAFFLHMLMKLGTDDTVMKANLHKVKQQFMTTQDASKDGRIRMKELAGMFLSEDENFLLLFRRENPLDSSVEFMQIWRKYDADSSGFISAAELRNFLRDLFLHHKKAISEAKLEEYTGTMMKIFDRNKDGRLDLNDLARILALQENFLLQFKMDACSTEERKRDFEKIFAYYDVSKTGALEGPEVDGFVKDMMELVQPSISGVDLDKFREILLRHCDVNKDGKIQKSELALCLGLKINPXSQTALPFALTMFL

SEQ ID NO: 1221 - protein, 1699 aa, Homo Sapiens
  misc_feature (1683)..(1683): Xaa can be any naturally occurring amino acid
MLASPEPKGLVPFTKESFELIKQHIAKTHNEDHEEEDLKPTPDLEVGKKLPFIYGNLSQGMVSEPLEDVDPYYYKKKNTFIVLNKNRTIFRFNAASILCTLSPFNCIRRTTIKVLVHPFFQLFILISVLIDCVFMSLTNLPKWRPVLENTLLGIYTFEILVKLFARGVWAGSFSFLGDPWNWLDFSVTVFEVIIRYSPLDFIPTLQTARTLRILKIIPLNQGLKSLVGVLIHCLKQLIGVIILTLFFLSIFSLIGMGLFMGNLKHKCFRWPQENENETLHNRTGNPYYIRETENFYYLEGERYALLCGNRTDAGQCPEGYVCVKAGINPDQGFTNFDSFGWALFALFRLMAQDYPEVLYHQILYASGKVYMIFFVVVSFLFSFYMASLFLGILAMAYEEEKQRVGEISKKIEPKFQQTGKELQEGNETDEAKTIQIEMKKRSPISTDTSLDVLEDATLRHKEELEKSKKICPLYWYKFAKTFLIWNCSPCWLKLKEFVHRIIMAPFTDLFLIICIILNVCFLTLEHYPMSKQTNTLLNIGNLVFIGIFTAEMIFKIIAMHPYGYFQVGWNIFDSMIVFHGLIELCLANVAGMALLRLFRMLRIFKLGKYWPTFQILMWSLSNSWVALKDLVLLLFTFIFFSAAFGMKLFGKNYEEFVCHIDKDCQLPRWHMHDFFHSFLNVFRILCGEWVETLWDCMEVAGQSWCIPFYLMVILIGNLLVLYLFLALVSSFSSCKDVTAEENNEAKNLQLAVARIKKGINYVLLKILCKTQNVPKDTMDHVNEVYVKEDISDHTLSELSNTQDFLKDKEKSSGTEKNATENESQSLIPSPSVSETVPIASGESDIENLDNKEIQSKSGDGGSKEKIKQSSSSECSTVDIAISEEEEMFYGGERSKHLKNGCRRGSSLGQISGASKKGKIWQNIRKTCCKIVENNWFKCFIGLVTLLSTGTLAFEDIYMDQRKTIKILLEYADMIFTYIFILEMLLKWMAYGFKAYFSNGWYRLDFVVVIVFCLSLIGKTREELKPLISMKFLRPLRVLSQFERMKVVVRALIKTTLPTLNVFLVCLMIWLIFSIMGVDLFAGRFYECIDPTSGERFPSSEVMNKSRCESLLFNESMLWENAKMNFDNVGNGFLSLLQVATFNGWITIMNSAIDSVAVNIQPHFEVNIYMYCYFINFIIFGVFLPLSMLITVIIDNFNKHKIKLGGSNIFITVKQRKQYRRLKKLMYEDSQRPVPRPLNKLQGFIFDVVTSQAFNVIVMVLICFQAIAMMIDTDVQSLQMSIALYWINSIFVMLYTMECILKLIAFRCFYFTIAWNIFDFMVVIFSITGLCLPMTVGSYLVPPSLVQLILLSRIIHMLRLGKGPKVFHNLMLPLMLSLPALLNIILLIFLVMFIYAVFGMYNFAYVKKEAGINDVSNFETFGNSMLCLFQVAIFAGWDGMLDAIFNSKWSDCDPDKINPGTQVRGDCGNPSVGIFYFVSYILISWLIIVNMYIVVVMEFLNIASKKKNKTLSEDDFRKFFQVWKRFDPDRTQYIDSSKLSDFAAALDPPLFMAKPNKGQLIALDLPMAVGDRIHCLDILLAFTKRVMGQDVRMEKVVSEIESGFLLANPFKITCEPITTTLKRKQEAVSATIIQRAYKNYRLRRNDKNTSDIHMIDGDRDVHATKEGAYFDKAKEKSPIQSQIXYHLPPLFIFLHISEKC

SEQ ID NO: 1222 - protein, 285 aa, Homo Sapiens
  misc_feature (281)..(281): Xaa can be any naturally occurring amino acid
MAAVVALSLRRRLPATTLGGACLQASRGAQTAAATAPRIKKFAIYRWDPDKAGDKPHMQTYEVDLNKCGPMVLDALIKIKNEVDSTLTFRRSCREGICGSCAMNINGGNTLACTRRIDTNLNKVSKIYPLPHMYVIKDLVPDLSNFYAQYKSIEPYLKKKDESQEGKQQYLQSIEEREKLDGLYECILCACCSTSCPSYWWNGDKYLGPAVLMQAYRWMIDSRDDFTEERLAKLQDPFSLYRCHTIMNCTRTCPKGLNPGKAIAEIKKMMATYKEKKASVXLFPC

SEQ ID NO: 1223 - protein, 774 aa, Homo Sapiens
  misc_feature (766)..(766): Xaa can be any naturally occurring amino acid
MTTYLEFIQQNEERDGVRFSWNVWPSSRLEATRMVVPVAALFTPLKERPDLPPIQYEPVLCSRTTCRAVLNPLCQVDYRAKLWACNFCYQRNQFPPSYAGISELNQPAELLPQFSSIEYVVLRGPQMPLIFLYVVDTCMEDEDLQALKESMQMSLSLLPPTALVGLITFGRMVQVHELGCEGISKSYVFRGTKDLSAKQLQEMLGLSKVPLTQATRGPQVQQPPPSNRFLQPVQKIDMNLTDLLGELQRDPWPVPQGKRPLRSSGVALSIAVGLLECTFPNTGARIMMFIGGPATQGPGMVVGDELKTPIRSWHDIDKDNAKYVKKGTKHFEALANRAATTGHVIDIYACALDQTGLLEMKCCPNLTGGYMVMGDSFNTSLFKQTFQRVFTKDMHGQFKMGFGGTLEIKTSREIKISGAIGPCVSLNSKGPCVSENEIGTGGTCQWKICGLSPTTTLAIYFEVVNQHNAPIPQGGRGAIQFVTQYQHSSGQRRIRVTTIARNWADAQTQIQNIAASFDQEAAAILMARLAIYRAETEEGPDVLRWLDRQLIRLCQKFGEYHKDDPSSFRFSETFSLYPQFMFHLRRSSFLQVFNNSPDESSYYRHHFMRQDLTQSLIMIQPILYAYSFSGPPEPVLLDSSSILADRILLMDTFFQILIYHGETIAQWRKSGYQDMPEYENFRHLLQAPVDDAQEILHSRFPMPRYIDTEHGGSQARFLLSKVNPSQTHNNMYAWGQESGAPILTDDVSLQVFMDHLKKLAVSSAAXSANNVKDT

SEQ ID NO: 1224 - protein, 802 aa, Homo Sapiens
  misc_feature (768)..(768): Xaa can be any naturally occurring amino acid
MATYLEFIQQNEERDGVRFSWNVWPSSRLEATRMVVPLACLLTPLKERPDLPPVQYEPVLCSRPTCKAVLNPLCQVDYRAKLWACNFCFQRNQFPPAYGGISEVNQPAELMPQFSTIEYVIQRGAQSPLIFLYVVDTCLEEDDLQALKESLQMSLSLLPPDALVGLITFGRMVQVHELSCEGISKSYVFRGTKDLTAKQIQDMLGLTKPAMPMQQARPAQPQEHPFASSRFLQPVHKIDMNLTDLLGELQRDPWPVTQGKRPLRSTGVALSIAVGLLEGTFPNTGARIMLFTGGPPTQGPGMVVGDELKIPIRSWHDIEKDNARFMKKATKHYEMLANRTAANGHCIDIYACALDQTGLLEMKCCANLTGGYMVMGDSFNTSLFKQTFQRIFTKDFNGDFRMAFGATLDVKTSRELKIAGAIGPCVSLNVKGPCVSENELGVGGTSQWKICGLDPTSTLGIYFEVVNQHNTPIPQGGRGAIQFVTHYQHSSTQRRIRVTTIARNWADVQSQLRHIEAAFDQEAAAVLMARLGVFRAESEEGPDVLRWLDRQLIRLCQKFGQYNKEDPTSFRLSDSFSLYPQFMFHLRRSPFLQVFNNSPDESSYYRHHFARQDLTQSLIMIQPILYSYSFHGPPEPVLLDSSSILADRILLMDTFFQIVIYLGETIAQWRKAGYQDMPEYENFKHLLQAPLDDAQEILQARFPMPRYINTEHGGSQARFLLSKVNPSQTHNNLYAWGQETGAPILTDDVSLQVFMDHLKKLAVSSACXAEDTTRKCNGVRLCSKCLERLDNIPVTFLADFNK

SEQ ID NO: 1225 - protein, 1120 aa, Homo Sapiens
  misc_feature (1095)..(1095): Xaa can be any naturally occurring amino acid
MNVNQSVPPVPPFGQPQPIYPGYHQSSYGGQSGSTAPAIPYGAYNGPVPGYQQTPPQGMSRAPPSSGAPPASTAQAPCGQAAYGQFGQGDVQNGPSSTVQMQRLPGSQPFGSPLAPVGNQPPVLQPYGPPPTSAQVATQLSGMQISGAVAPAPPSSGLGFGPPTSLASASGSFPNSGLYGSYPQGQAPPLSQAQGHPGIQTPQRSAPSQASSFTPPASGGPRLPSMTGPLLPGQSFGGPSVSQPNHVSSPPQALPPGTQMTGPLGPLPPMHSPQQPGYQPQQNGSFGPARGPQSNYGGPYPAAPTFGSQPGPPQPLPPKRLDPDAIPSPIQVIEDDRNNRGTEPFVTGVRGQVPPLVTTNFLVKDQGNASPRYIRCTSYNIPCTSDMAKQAQVPLAAVIKPLARLPPEEASPYVVDHGESGPLRCNRCKAYMCPFMQFIEGGRRFQCCFCSCINDVPPQYFQHLDHTGKRVDAYDRPELSLGSYEFLATVDYCKNNKFPSPPAFIFMIDVSYNAIRTGLVRLLCEELKSLLDFLPREGGAEESAIRVGFVTYNKVLHFYNVKSSLAQPQMMVVSDVADMFVPLLDGFLVNVNESRAVITSLLDQIPEMFADTRETETVFVPVIQAGMEALKAAECAGKLFLFHTSLPIAEAPGKLKNRDDRKLINTDKEKTLFQPQTGAYQTLAKECVAQGCCVDLFLFPNQYVDVATLSVVPQLTGGSVYKYASFQVENDQERFLSDLRRDVQKVVGFDAVMRVRTSTGIRAVDFFGAFYMSNTTDVELAGLDGDKTVTVEFKHDDRLNEESGALLQCALLYTSCAGQRRLRIHNLALNCCTQLADLYRNCETDTLINYMAKFAYRGVLNSPVKAVRDTLITQCAQILACYRKNCASPSSAGQLILPECMKLLPVYLNCVLKSDVLQPGAEVTTDDRAYVRQLVTSMDVTETNVFFYPRLLPLTKSPVESTTEPPAVRASEERLSNGDIYLLENGLNLFLWVGASVQQGVVQSLFSVSSFSQITSGLSVLPVLDNPLSKKVRGLIDSLRAQRSRYMKLTVVKQEDKMEMLFKHFLVEDKSLSGGASYVDFLCHMHKEIRQLLSXSKWVNGIGPRLASRKHPRMSEKLGQ

SEQ ID NO: 1226 - protein, 470 aa, Homo Sapiens
  misc_feature (463)..(463): Xaa can be any naturally occurring amino acid
MKPNIIFVLSLLLILEKQAAVMGQKGGSKGRLPSEFSQFPHGQKGQHYSGQKGKQQTESKGSFSIQYTYHVDANDHDQSRKSQQYDLNALHKTTKSQRHLGGSQQLLHNKQEGRDHDKSKGHFHRVVIHHKGGKAHRGTQNPSQDQGNSPSGKGISSQYSNTEERLWVHGLSKEQTSVSGAQKGRKQGGSQSSYVLQTEELVANKQQRETKNSHQNKGHYQNVVEVREEHSSKVQTSLCPAHQDKLQHGSKDIFSTQDELLVYNKNQHQTKNLNQDQQHGRKANKISYQSSSTEERRLHYGENGVQKDVSQSSIYSQTEEKAQGKSQKQITIPSQEQEHSQKANKISYQSSSTEERRLHYGENGVQKDVSQRSIYSQTEKLVAGKSQIQAPNPKQEPWHGENAKGESGQSTNREQDLLSHEQKGRHQHGSHGGLDIVIIEQEDDSDRHLAQHLNNDRNPLFTXTYHSVTM

SEQ ID NO: 1227 - protein, 590 aa, Homo Sapiens
  misc_feature (583)..(583): Xaa can be any naturally occurring amino acid
MKSIILFVLSLLLILEKQAAVMGQKGGSKGQLPSGSSQFPHGQKGQHYFGQKDQQHTKSKGSFSIQHTYHVDINDHDWTRKSQQYDLNALHKATKSKQHLGGSQQLLNYKQEGRDHDKSKGHFHMIVIHHKGGQAHHGTQNPSQDQGNSPSGKGLSSQCSNTEKRLWVHGLSKEQASASGAQKGRTQGGSQSSYVLQTEELVVNKQQRETKNSHQNKGHYQNVVDVREEHSSKLQTSLHPAHQDRLQHGPKDIFTTQDELLVYNKNQHQTKNLSQDQEHGRKAHKISYPSSRTEERQLHHGEKSVQKDVSKGSISIQTEEKIHGKSQNQVTIHSQDQEHGHKENKISYQSSSTEERHLNCGEKGIQKGVSKGSISIQTEEQIHGKSQNQVRIPSQAQEYGHKENKISYQSSSTEERRLNSGEKDVQKGVSKGSISIQTEEKIHGKSQNQVTIPSQDQEHGHKENKMSYQSSSTEERRLNYGGKSTQKDVSQSSISFQIEKLVEGKSQIQTPNPNQDQWSGQNAKGKSGQSADSKQDLLSHEQKGRYKQESSESHNIVITEHEVAQDDHLTQQYNEDRNPISTXPCCLATT

SEQ ID NO: 1228 - protein, 393 aa, Homo Sapiens
  misc_feature (372)..(372): Xaa can be any naturally occurring amino acid
MWRSLGLALALCLLPSGGTESQDQSSLCKQPPAWSIRDQDPMLNSNGSVTVVALLQASYLCILQASKLEDLRVKLKKEGYSNISYIVVNHQGISSRLKYTHLKNKVSEHIPVYQQEENQTDVWTLLNGSKDDFLIYDRCGRLVYHLGLPFSFLTFPYVEEAIKIAYCEKKCGNCSLTTLKDEDFCKRVSLATVDKTVETPSPHYHHEHHHNHGHQHLGSSELSENQQPGAPNAPTHPAPPGLHHHHKHKGQHRQGHPENRDMPASEDLQDLQKKLCRKRCINQLLCKLPTDSELAPRSCCHCRHLIFEKTGSAITQCKENLPSLCSQGLRAEENITESCQRLPPAAQISQQLIPTEASASRKNQAKKEPSNXIFKIGHTPQFSLDTISFPAFL

SEQ ID NO: 1229 - protein, 458 aa, Homo Sapiens
  misc_feature (445)..(445): Xaa can be any naturally occurring amino acid
MKVVPSLLLSVLLAQVWLVPGLAPSPQSPETPAPQNQTSRVVQAPKEEEEDEQEASEEKASEEEKAWLMASRQQLAKETSNFGFSLLRKISMRHDGNMVFSPFGMSLAMTGLMLGATGPTETQIKRGLHLQALKPTKPGLLPSLFKGLRETLSRNLELGLTQGSFAFIHKDFDVKETFFNLSKRYFDTECVPMNFRNASQAKRLMNHYINKETRGKIPKLFDEINPETKLILVDYILFKGKWLTPFDPVFTEVDTFHLDKYKTIKVPMMYGAGKFASTFDKNFRCHVLKLPYQGNATMLVVLMEKMGDHLALEDYLTTDLVETWLRNMKTRNMEVFFPKFKLDQKYEMHELLRQMGIRRIFSPFADLSELSATGRNLQVSRVLQRTVIEVDERGTEAVAGILSEITAYSMPPVIKVDRPFHFMIYEETSGMLLFLGRVVNPTLLXFRTRISTSCCSRC

SEQ ID NO: 1230 - protein, 449 aa, Homo Sapiens
  misc_feature (428)..(428): Xaa can be any naturally occurring amino acid
MHLIDYLLLLLVGLLALSHGQLHVEHDGESCSNSSHQQILETGEGSPSLKIAPANADFAFRFYYLIASETPGKNIFFSPLSISAAYAMLSLGACSHSRSQILEGLGFNLTELSESDVHRGFQHLLHTLNLPGHGLETRVGSALFLSHNLKFLAKFLNDTMAVYEAKLFHTNFYDTVGTIQLINDHVKKETRGKIVDLVSELKKDVLMVLVNYIYFKALWEKPFISSRTTPKDFYVDENTTVRVPMMLQDQEHHWYLHDRYLPCSVLRMDYKGDATVFFILPNQGKMREIEEVLTPEMLMRWNNLLRKRNFYKKLELHLPKFSISGSYVLDQILPRLGFTDLFSKWADLSGITKQQKLEASKSFHKATLDVDEAGTEAAAATSFAIKFFSAQTNRHILRFNRPFLVVIFSTSTQSVLFLGKVVDPTKPXPSQGCSSVPSRRMWQGRAGSE

SEQ ID NO: 1231 - protein, 449 aa, Homo Sapiens
  misc_feature (406)..(406): Xaa can be any naturally occurring amino acid
MPLLLYTCLLWLPTSGLWTVQAMDPNAAYVNMSNHHRGLASANVDFAFSLYKHLVALSPKKNIFISPVSISMALAMLSLGTCGHTRAQLLQGLGFNLTERSETEIHQGFQHLHQLFAKSDTSLEMTMGNALFLDGSLELLESFSADIKHYYESEVLAMNFQDWATASRQINSYVKNKTQGKIVDLFSGLDSPAILVLVNYIFFKGTWTQPFDLASTREENFYVDETTVVKVPMMLQSSTISYLHDAELPCQLVQMNYVGNGTVFFILPDKGKMNTVIAALSRDTINRWSAGLTSSQVDLYIPKVTISGVYDLGDVLEEMGIADLFTNQANFSRITQDAQLKSSKVVHKAVLQLNEEGVDTAGSTGVTLNLTSKPIILRFNQPFIIMIFDHFTWSSLFLARVMNPVXETTHPEPQHCLTLGTRDPTEMFWRAGGFPQSPPSSSPSNQSCV

SEQ ID NO: 1232 - protein, 435 aa, Homo Sapiens
  misc_feature (416)..(416): Xaa can be any naturally occurring amino acid
MSPFLYLVLLVLGLHATIHCASPEGKVTACHSSQPNATLYKMSSINADFAFNLYRRFTVETPDKNIFFSPVSISAALVMLSFGACCSTQTEIVETLGFNLTDTPMVEIQHGFQHLICSLNFPKKELELQIGNALFIGKHLKPLAKFLNDVKTLYETEVFSTDFSNISAAKQEINSHVEMQTKGKVVGLIQDLKPNTTMVLVNYIHFKAQWANPFDPSKTEDSSSFLIDKTTTVQVPMMHQMEQYYHLVDMELNCTVLQMDYSKNALALFVLPKEGQMESVEAAMSSKTLKKWNRLLQKGWVDLFVPKFSISATYDLGATLLKMGIQHAYSENADFSGLTEDNGLKLSNAAHKAVLHIGEKGTEAAAVPEVELSDQPENTFLHPIIQIDRSFMLLILERSTRSILFLGKVVNPTEAXLGKRPLANCTCVLQWEINK

SEQ ID NO: 1233 - protein, 543 aa, Homo Sapiens
  misc_feature (500)..(500): Xaa can be any naturally occurring amino acid
MKHSLNALLIFLIITSAWGGSKGPLDQLEKGGETAQSADPQWEQLNNKNLSMPLLPADFHKENTVTNDWIPEGEEDDDYLDLEKIFSEDDDYIDIVDSLSVSPTDSDVSAGNILQLFHGKSRIQRLNILNAKFAFNLYRVLKDQVNTFDNIFIAPVGISTAMGMISLGLKGETHEQVHSILHFKDFVNASSKYEITTIHNLFRKLTHRLFRRNFGYTLRSVNDLYIQKQFPILLDFKTKVREYYFAEAQIADFSDPAFISKTNNHIMKLTKGLIKDALENIDPATQMMILNCIYFKGSWVNKFPVEMTHNHNFRLNEREVVKVSMMQTKGNFLAANDQELDCDILQLEYVGGISMLIVVPHKMSGMKTLEAQLTPRVVERWQKSMTNRTREVLLPKFKLEKNYNLVESLKLMGIRMLFDKNGNMAGISDQRIAIDLFKHQGTITVNEEGTQATTVTTVGFMPLSTQVRFTVDRPFLFLIYEHRTSCLLFMGRVANPSRSXRWRSRCLKCLGGTLILFPFQQREQRCSGIIYVVYATNLNSRPI

SEQ ID NO: 1234 - protein, 559 aa, Homo Sapiens
  misc_feature (492)..(492): Xaa can be any naturally occurring amino acid
MALLWGLLVLSWSCLQGPCSVFSPVSAMEPLGRQLTSGPNQEQVSPLTLLKLGNQEPGGQTALKSPPGVCSRDPTPEQTHRLARAMMAFTADLFSLVAQTSTCPNLILSPLSVALALSHLALGAQNHTLQRLQQVLHAGSGPCLPHLLSRLCQDLGPGAFRLAARMYLQKGFPIKEDFLEQSEQLFGAKPVSLTGKQEDDLANINQWVKEATEGKIQEFLSGLPEDTVLLLLNAIHFQGFWRNKFDPSLTQRDSFHLDEQFTVPVEMMQARTYPLRWFLLEQPEIQVAHFPFKNNMSFVVLVPTHFEWNVSQVLANLSWDTLHPPLVWERPTKVRLPKLYLKHQMDLVATLSQLGLQELFQAPDLRGISEQSLVVSGVQHQSTLELSEVGVEAAAATSIAMSRMSLSSFSVNRPFLFFIFEDTTGLPLFVGSVRNPNPSAPRELKEQQDSPGNKDFLQSLKGFPRGDKLFGPDLKLVPPMEEDYPQFGSPKXGAVAVASRVPAWTSLSTHVTLSNRLCGTGAGAGGSLREAILSQHLLGSLGWGGGAAGRRAGIGEPGA

SEQ ID NO: 1235 - protein, 546 aa, Homo Sapiens
  misc_feature (501)..(501): Xaa can be any naturally occurring amino acid
MASRLTLLTLLLLLLAGDRASSNPNATSSSSQDPESLQDRGEGKVATTVISKMLFVEPILEVSSLPTTNSTTNSATKITANTTDEPTTQPTTEPTTQPTIQPTQPTTQLPTDSPTQPTTGSFCPGPVTLCSDLESHSTEAVLGDALVDFSLKLYHAFSAMKKVETNMAFSPFSIASLLTQVLLGAGENTKTNLESILSYPKDFTCVHQALKGFTTKGVTSVSQIFHSPDLAIRDTFVNASRTLYSSSPRVLSNNSDANLELINTWVAKNTNNKISRLLDSLPSDTRLVLLNAIYLSAKWKTTFDPKKTRMEPFHFKNSVIKVPMMNSKKYPVAHFIDQTLKAKVGQLQLSHNLSLVILVPQNLKHRLEDMEQALSPSVFKAIMEKLEMSKFQPTLLTLPRIKVTTSQDMLSIMEKLEFFDFSYDLNLCGLTEDPDLQVSAMQHQTVLELTETGVEAAAASAISVARTLLVFEVQQPFLFVLWDQQHKFPVFMGRVYDPRAXDLQDQVRASATSPASALSCSPAAACLDLAPATSCLRCPLSTKRAP

SEQ ID NO: 1236 - protein, 506 aa, Homo Sapiens
  misc_feature (502)..(502): Xaa can be any naturally occurring amino acid
METILEQQRRYHEEKERLMDVMAKEMLTKKSTLRDQINSDHRTRAMQDRYMEVSGNLRDLYDDKDGLRKEELNAISGPNEFAEFYNRLKQIKEFHRKHPNEICVPMSVEFEELLKARENPSEEAQNLVEFTDEEGYGRYLDLHDCYLKYINLKASEKLDYITYLSIFDQLFDIPKERKNAEYKRYLEMLLEYLQDYTDRVKPLQDQNELFGKIQAEFEKKWENGTFPGWPKETSSALTHAGAHLDLSAFSSWEELASLGLDRLKSALLALGLKCGGTLEERAQRLFSTKGKSLESLDTSLFAKNPKSKGTKRDTERNKDIAFLEAQIYEYVEILGEQRHLTHENVQRKQARTGEEREEEEEEQISESESEDEENEIIYNPKNLPLGWDGKPIPYWLYKLHGLNINYNCEICGNYTYRGPKAFQRHFAEWRHAHGMRCLGIPNTAHFANVTQIEDAVSLWAKLKLQKASERWQPDTEEEYEDSSGNVVNKKTYEDLKRQGLLXCSGM

SEQ ID NO: 1237 - protein, 655 aa, Homo Sapiens
  misc_feature (646)..(646): Xaa can be any naturally occurring amino acid
MSLKMDNRDVAGKANRWFGVAPPKSGKMNMNILHQEELIAQKKREIEAKMEQKAKQNQVASPQPPHPGEITNAHNSSCISNKFANDGSFLQQFLKLQKAQTSTDAPTSAPSAPPSTPTPSAGKRSLLISRRTGLGLASLPGPVKSYSHAKQLPVAHRPSVFQSPDEDEEEDYEQWLEIKVSPPEGAETRKVIEKLARFVAEGGPELEKVAMEDYKDNPAFAFLHDKNSREFLYYRKKVAEIRKEAQKSQAASQKVSPPEDEEVKNLAEKLARFIADGGPEVETIALQNNRENQAFSFLYEPNSQGYKYYRQKLEEFRKAKASSTGSFTAPDPGLKRKSPPEALSGSLPPATTCPASSTPAPTIIPAPAAPGKPASAATVKRKRKSRWGPEEDKVELPPAELVQRDVDASPSPLSVQDLKGLGYEKGKPVGLVGVTELSDAQKKQLKEQQEMQQMYDMIMQHKRAMQDMQLLWEKAVQQHQHGYDSDEEVDSELGTWEHQLRRMEMDKTREWAEQLTKMGRGKHFIGDFLPPDELEKFMETFKALKEGREPDYSEYKEFKLTVENIGYQMLMKMGWKEGEGLGSEGQGIKNPVNKGTTTVDGAGFGIDRPAELSKEDDEYEAFRKRMMLAYRFRPNPLNNPRRPYYXVFWKYILSE

SEQ ID NO: 1238 - protein, 506 aa, Homo Sapiens
  misc_feature (485)..(485): Xaa can be any naturally occurring amino acid
MSNTTVVPSTAGPGPSGGPGGGGGGGGGGGGTEVIQVTNVSPSASSEQMRTLFGFLGKIDELRLFPPDDSPLPVSSRVCFVKFHDPDSAVVAQHLTNTVFVDRALIVVPYAEGVIPDEAKALSLLAPANAVAGLLPGGGLLPTPNPLTQIGAVPLAALGAPTLDPALAALGLPGANLNSQSLAADQLLKLMSTVDPKLNHVAAGLVSPSLKSDTSSKEIEEAMKRVREAQSLISAAIEPDKKEEKRRHSRSRSRSRRRRTPSSSRHRRSRSRSRRRSHSKSRSRRRSKSPRRRRSHSRERGRRSRSTSKTRDKKKEDKEKKRSKTPPKSYSTARRSRSASRERRRRRSRSGTRSPKKPRSPKRKLSRSPSPRRHKKEKKKDKDKERSRDERERSTSKKKKSKDKEKDRERKSESDKDVKQVTRDYDEEEQGYDSEKEKKEEKKPIETGSPKTKECSVEKGTGDSLRESKVNGDDHHEEDMDMSDXILPLRESNCIPASVSFLCVIS

SEQ ID NO: 1239 - protein, 1155 aa, Homo Sapiens
  misc_feature (1148)..(1148): Xaa can be any naturally occurring amino acid
MDAVNAFNQELFSLMDMKPPISRAKMILITKAAIKAIKLYKHVVQIVEKFIKKCKPEYKVPGLYVIDSIVRQSRHQFGTDKDVFGPRFSKNITATFQYLYLCPSEDKSKIVRVLNLWQKNGVFKIEIIQPLLDMAAGTSNAAPVAENVTNNEGSPPPPVKVSSEPPTQATPNSVPAVPQLPSSDAFAAVAQLFQTTQGQQLQQILQTFQQPPKPQSPALDNAVMAQVQAITAQLKTTPTQPSEQKAAFPPPEQKTAFDKKLLDRFDYDDEPEAVEESKKEDTTAVTTTAPAAAVPPAPTATVPAAAAPAAASPPPPQAPFGFPGDGMQQPAYTQHQNMDQFQPRMMGIQQDPMHHQVPLPPNGQMPGFGLLPTPPFPPMAQPVIPPTPPVQQPFQASFQAQNEPLTQKPHQQEMEVEQPCIQEVKRHMSDNRKSRSRSASRSPKRRRSRSGSRSRRSRHRRSRSRSRDRRRHSPRSRSQERRDREKERERRQKGLPQVKPETASVCSTTLWVGQLDKRTTQQDVASLLEEFGPIESINMIPPRGCAYIVMVHRQDAYRALQKLSRGNYKVNQKSIKIAWALNKGIKADYKQYWDVELGVTYIPWDKVKPEELESFCEGGMLDSDTLNPDWKGIPKKPENEVAQNGGAETSHTEPVSPIPKPLPVPVPPIPVPAPITVPPPQVPPHQPGPPVVGALQPPAFTPPLGIPPPGFGPGVPPPPPPPPFLRPGFNPMHLPPGFLPPGPPPPITPPVSIPPPHTPPISIPNSTIAGINEDTTKDLSIGNPIPTVVSGARGNAESGDSVKMYGSAVPPAAPTNLPTPPVTQPVSLLGTQGVAPGPVIGLQAPSTGLLGARPGLIPLQRPPGMPPPHLQRFPLMPPRPMPPHMMHRGPPPGPGGFAMPPPHGMKGPFPPHGPFVRPGGMPGLGGPGPGPGGPEDRDGRQQPPQQPQQQPQPQAPQQPQQQQQQQPPPSQQPPPTQQQPQQFRNDNRQQFNSGRDQERFGRRSFGNRVENDRERYGNRNDDRDNSNRDRREWGRRSPDRDRHRDLEERNRRSSGHRDRERDSRDRESRREKEEARGKEKPEVTDRAGGNKTVEPPISQVGNVDTASELEKGVSEAAVLKPSEELPAEATSSVEPEKDSGSAAEAPRXRLEFVKM

SEQ ID NO: 1240 - protein, 407 aa, Homo Sapiens
  misc_feature (376)..(376): Xaa can be any naturally occurring amino acid
MLLFLLSALVLLTQPLGYLEAEMKTYSHRTMPSACTLVMCSSVESGLPGRDGRDGREGPRGEKGDPGLPGAAGQAGMPGQAGPVGPKGDNGSVGEPGPKGDTGPSGPPGPPGVPGPAGREGPLGKQGNIGPQGKPGPKGEAGPKGEVGAPGMQGSAGARGLAGPKGERGVPGERGVPGNTGAAGSAGAMGPQGSPGARGPPGLKGDKGIPGDKGAKGESGLPDVASLRQQVEALQGQVQHLQAAFSQYKKVELFPNGQSVGEKIFKTAGFVKPFTEAQLLCTQAGGQLASPRSAAENAALQQLVVAKNEAAFLSMTDSKTEGKFTYPTGESLVYSNWAPGEPNDDGGSEDCVEIFTNGKWNDRACGEKRLVVCEFXANWGGWGSAWPRSLARSQGLDPHAANILIKR

SEQ ID NO: 1241 - protein, 612 aa, Homo Sapiens
  misc_feature (505)..(505): Xaa can be any naturally occurring amino acid
MEPAGPAPGRLGPLLCLLLAASCAWSGVAGEEELQVIQPDKSVLVAAGETATLRCTATSLIPVGPIQWFRGAGPGRELIYNQKEGHFPRVTTVSDLTKRNNMDFSIRIGNITPADAGTYYCVKFRKGSPDDVEFKSGAGTELSVRAKPSAPVVSGPAARATPQHTVSFTCESHGFSPRDITLKWFKNGNELSDFQTNVDPVGESVSYSIHSTAKVVLTREDVHSQVICEVAHVTLQGDPLRGTANLSETIRVPPTLEVTQQPVRAENQVNVTCQVRKFYPQRLQLTWLENGNVSRTETASTVTENKDGTYNWMSWLLVNVSAHRDDVKLTCQVEHDGQPAVSKSHDLKVSAHPKEQGSNTAAENTGSNERNIYIVVGVVCTLLVALLMAALYLVRIRQKKAQGSTSSTRLHEPEKNAREITQDTNDITYADLNLPKGKKPAPQAAEPNNHTEYASIQTSPQPASEDTLTYADLDMVHLNRTPKQPAPKPEPSFSEYASVQVPRKXMGPWFALAPISTRFLVPQGAAVMSTANPVPGGLGRCRLWDPGARVALLSPPLLGSPALPGQPRPPPPTLPHTWRLTLPNQPGNQPGKWPELPGVQELLCLRPSPCGF

SEQ ID NO: 1242 - protein, 448 aa, Homo Sapiens
  misc_feature (390)..(390): Xaa can be any naturally occurring amino acid
MEDSPTMVRVDSPTMVRGENQVSPCQGRRCFPKALGYVTGDMKELANQLKDKPVVLQFIDWILRGISQVVFVNNPVSGILILVGLLVQNPWWALTGWLGTVVSTLMALLLSQDRSLIASGLYGYNATLVGVLMAVFSDKGDYFWWLLLPVCAMSMTCPIFSSALNSMLSKWDLPVFTLPFNMALSMYLSATGHYNPFFPAKLVIPITTAPNISWSDLSALELLKSIPVGVGQIYGCDNPWTGGIFLGAILLSSPLMCLHAAIGSLLGIAAGLSLSAPFENIYFGLWGFNSSLACIAMGGMFMALTWQTHLLALGCALFTAYLGVGMANFMAEVGLPACTWPFCLATLLFLIMTTKNSNIYKMPLSKVTYPEENRIFYLQAKKRMVESPLXEQAPFAAMVTSHFCLTAPANFQGLSKLLFFTSINFHTDASVICSYAHFVFSFQLQEYP

SEQ ID NO: 1243 - protein, 528 aa, Homo Sapiens
  misc_feature (502)..(502): Xaa can be any naturally occurring amino acid
MEQQDQSMKEGRLTLVLALATLIAAFGSSFQYGYNVAAVNSPALLMQQFYNETYYGRTGEFMEDFPLTLLWSVTVSMFPFGGFIGSLLVGPLVNKFGRKGALLFNNIFSIVPAILMGCSRVATSFELIIISRLLVGICAGVSSNVVPMYLGELAPKNLRGALGVVPQLFITVGILVAQIFGLRNLLANVDGWPILLGLTGVPAALQLLLLPFFPESPRYLLIQKKDEAAAKKALQTLRGWDSVDREVAEIRQEDEAEKAAGFISVLKLFRMRSLRWQLLSIIVLMGGQQLSGVNAIYYYADQIYLSAGVPEEHVQYVTAGTGAVNVVMTFCAVFVVELLGRRLLLLLGFSICLIACCVLTAALALQDTVSWMPYISIVCVISYVIGHALGPSPIPALLITEIFLQSSRPSAFMVGGSVHWLSNFTVGLIFPFIQEGLGPYSFIVFAVICLLTTIYIFLIVPETKAKTFIEINQIFTKMNKVSEVYPEKEELKELPPVTSEQXLWRGSQWSWSARGFPLWLIFLTSSCL

SEQ ID NO: 1244 - protein, 689 aa, Homo Sapiens
  misc_feature (640)..(640): Xaa can be any naturally occurring amino acid
MLSYGERLGSPAVSPLPVRGGHVMRGTAFAYVPSPQVLHRIPGTSAYAFPSLGPVALAEHTCPCGEVLERHEPLPAKLALEEEQKPESRLVPKLRQAGAMLLKVPLMLTFLYLFVCSLDMLSSAFQLAGGKVAGDIFKDNAILSNPVAGLVVGILVTVLVQSSSTSTSIIVSMVSSGLLEVSSAIPIIMGSNIGTSVTNTIVALMQAGDRTDFRRAFAGATVHDCFNWLSVLVLLPLEAATGYLHHITRLVVASFNIHGGRDAPDLLKIITEPFTKLIIQLDESVITSIATGDESLRNHSLIQIWCHPDSLQAPTSMSRAEANSSQTLGNATMEKCNHIFVDTGLPDLAVGLILLAGSLVLLCTCLILLVKMLNSLLKGQVAKVIQKVINTDFPAPFTWVTGYFAMVVGASMTFVVQSSSVFTSAITPLIGLGVISIERAYPLTLGSNIGTTTTAILAALASPREKLSSAFQIALCHFFFNISGILLWYPVPCTRLPIRMAKALGKRTAKYRWFAVLYLLVCFLLLPSLVFGISMAGWQVMVGVGTPFGALLAFVVLINVLQSRSPGHLPKWLQTWDFLPRWMHSLKPLDHLITRATLCCARPEPRSPPLPPRVFLEELPPATPSPRLALPAHHNATRLXAVGPDYSLEWGRPGVERQGREGVCRYVHVPVPPWVPVSPSVAPQSSGLV

SEQ ID NO: 1245 - protein, 515 aa, Homo Sapiens
  misc_feature (470)..(470): Xaa can be any naturally occurring amino acid
MARGLGAPHWVAVGLLTWATLGLLVAGLGGHDDLHDDLQEDFHGHSHRHSHEDFHHGHSHAHGHGHTHESIWHGHTHDHDHGHSHEDLHHGHSHGYSHESLYHRGHGHDHEHSHGGYGESGAPGIKQDLDAVTLWAYALGATVLISAAPFFVLFLIPVESNSPRHRSLLQILLSFASGGLLGDAFLHLIPHALEPHSHHTLEQPGHGHSHSGQGPILSVGLWVLSGIVAFLVVEKFVRHVKGGHGHSHGHGHAHSHTRGSHGHGRQERSTKEKQSSEEEEKETRGVQKRRGGSTVPKDGPVRPQNAEEEKRGLDLRVSGYLNLAADLAHNFTDGLAIGASFRGGRGLGILTTMTVLLHEVPHEVGDFAILVQSGCSKKQAMRLQLLTAVGALAGTACALLTEGGAVGSEIAGGAGPGWVLPFTAGGFIYVATVSVLPELLREASPLQSLLEVLGLLGGVIMMVLIAHLEXGVDKLPLPQTSTPNSRSGVRRGWGPWPGTSAKGRNCSLGEWLLWH

SEQ ID NO: 1246 - protein, 689 aa, Homo Sapiens
  misc_feature (665)..(665): Xaa can be any naturally occurring amino acid
MDSSTWSPKTTAVTRPVETHELIRNAADISIIVIYFVVVMAVGLWAMFSTNRGTVGGFFLAGRSMVWWPIGASLFASNIGSGHFVGLAGTGAASGIAIGGFEWNALVLVVVLGWLFVPIYIKAGVVTMPEYLRKRFGGQRIQVYLSLLSLLLYIFTKISADIFSGAIFINLALGLNLYLAIFLLLAITALYTITGGLAAVIYTDTLQTVIMLVGSLILTGFAFHEVGGYDAFMEKYMKAIPTIVSDGNTTFQEKCYTPRADSFHIFRDPLTGDLPWPGFIFGMSILTLWYWCTDQVIVQRCLSAKNMSHVKGGCILCGYLKLMPMFIMVMPGMISRILYTEKIACVVPSECEKYCGTKVGCTNIAYPTLVVELMPNGLRGLMLSVMLASLMSSLTSIFNSASTLFTMDIYAKVRKRASEKELMIAGRLFILVLIGISIAWVPIVQSAQSGQLFDYIQSITSYLGPPIAAVFLLAIFWKRVNEPGAFWGLILGLLIGISRMITEFAYGTGSCMEPSNCPTIICGVHYLYFAIILFAISFITIVVISLLTKPIPDVHLYRLCWSLRNSKEERIDLDAEEENIQEGPKETIEIETQVPEKKKGIFRRAYDLFCGLEQHGAPKMTEEEEKAMKMKMTDTSEKPLWRTVLNVNGIILVTVAVFCHAYFAXVLPFAVDLPWLDSYSPSFSLVLWC

SEQ ID NO: 1247 - protein, 651 aa, Homo Sapiens
  misc_feature (644)..(644): Xaa can be any naturally occurring amino acid
MEAVETGERPTFGAWDYGVFALMLLVSTGIGLWVGLARGGQRSAEDFFTGGRRLAALPVGLSLSASFMSAVQVLGVPSEAYRYGLKFLWMCLGQLLNSVLTALLFMPVFYRLGLTSTYEYLEMRFSRAVRLCGTLQYIVATMLYTGIVIYAPALILNQVTGLDIWASLLSTGIICTFYTAVGGMKAVVWTDVFQVVVMLSGFWVVLARGVMLVGGPRQVLTLAQNHSRINLMDFNPDPRSRYTFWTFVVGGTLVWLSMYGVNQAQVQRYVACRTEKQAKLALLINQVGLFLIVSSAACCGIVMFVFYTDCDPLLLGRISAPDQYMPLLVLDIFEDLPGVPGLFLACAYSGTLSTASTSINAMAAVTVEDLIKPRLRSLAPRKLVIISKGLSLIYGSACLTVAALSSLLGGGVLQGSFTVMGVISGPLLGAFILGMFLPACNTPGVLAGLGAGLALSLWVALGATLYPPSEQTMRVLPSSAARCVALSVNASGLLDPALLPANDSSRAPSSGMDASRPALADSFYAISYLYYGALGTLTTVLCGALISCLTGPTKRSTLAPGLLWWDLARQTASVAPKEEVAILDDNLVKGPEELPTGNKKPPGFLPTNEDRLFFLGQKELEGAGSWTPCVGHDGGRDQQETNLXGQGQPRD

SEQ ID NO: 1248 - protein, 621 aa, Homo Sapiens
  misc_feature (600)..(600): Xaa can be any naturally occurring amino acid
MATNGSKVADGQISTEVSEAPVANDKPKTLVVKVQKKAADLPDRDTWKGRFDFLMSCVGYAIGLGNVWRFPYLCGKNGGGAFLIPYFLTLIFAGVPLFLLECSLGQYTSIGGLGVWKLAPMFKGVGLAAAVLSFWLNIYYIVIISWAIYYLYNSFTTTLPWKQCDNPWNTDRCFSNYSMVNTTNMTSAVVEFWERNMHQMTDGLDKPGQIRWPLAITLAIAWILVYFCIWKGVGWTGKVVYFSATYPYIMLIILFFRGVTLPGAKEGILFYITPNFRKLSDSEVWLDAATQIFFSYGLGLGSLIALGSYNSFHNNVYRDSIIVCCINSCTSMFAGFVIFSIVGFMAHVTKRSIADVAASGPGLAFLAYPEAVTQLPISPLWAILFFSMLLMLGIDSQFCTVEGFITALVDEYPRLLRNRRELFIAAVCIISYLIGLSNITQGGIYVFKLFDYYSASGMSLLFLVFFECVSISWFYGVNRFYDNIQEMVGSRPCIWWKLCWSFFTPIIVAGVFIFSAVQMTQLTMGNYVFPKWGQGVGWLMALSSMVLIPGYMAYMFLTLKGSLKQRIQVMVQPSEDIVRPENGPEQPQAGSSTSKEAYIXGGGHSPTRHSHPPTWLSATTT

SEQ ID NO: 1249 - protein, 668 aa, Homo Sapiens
  misc_feature (618)..(618): Xaa can be any naturally occurring amino acid
MLLARMNPQVQPENNGADTGPEQPLRARKTAELLVVKERNGVQCLLAPRDGDAQPRETWGKKIDFLLSVVGFAVDLANVWRFPYLCYKNGGGAFLIPYTLFLIIAGMPLFYMELALGQYNREGAATVWKICPFFKGVGYAVILIALYVGFYYNVIIAWSLYYLFSSFTLNLPWTDCGHTWNSPNCTDPKLLNGSVLGNHTKYSKYKFTPAAEFYERGVLHLHESSGIHDIGLPQWQLLLCLMVVVIVLYFSLWKGVKTSGKVVWITATLPYFVLFVLLVHGVTLPGASNGINAYLHIDFYRLKEATVWIDAATQIFFSLGAGFGVLIAFASYNKFDNNCYRDALLTSSINCITSFVSGFAIFSILGYMAHEHKVNIEDVATEGAGLVFILYPEAISTLSGSTFWAVVFFVMLLALGLDSSMGGMEAVITGLADDFQVLKRHRKLFTFGVTFSTFLLALFCITKGGIYVLTLLDTFAAGTSILFAVLMEAIGVSWFYGVDRFSNDIQQMMGFRPGLYWRLCWKFVSPAFLLFVVVVSIINFKPLTYDDYIFPPWANWVGWGIALSSMVLVPIYVIYKFLSTQGSLWERLAYGITPENEHHLVAQRDIRQFQLQHWLAIXACLEEKEEPPCQCPGHRHPLRSHLGHHLGIPPLEVVLSDPLFFSHLQMIS

SEQ ID NO: 1250 - protein, 658 aa, Homo Sapiens
  misc_feature (621)..(621): Xaa can be any naturally occurring amino acid
MATKEKLQCLKDFHKDILKPSPGKSPGTRPEDEAEGKPPQREKWSSKIDFVLSVAGGFVGLGNVWRFPYLCYKNGGGAFLIPYFIFLFGSGLPVFFLEIIIGQYTSEGGITCWEKICPLFSGIGYASVVIVSLLNVYYIVILAWATYYLFQSFQKELPWAHCNHSWNTPHCMEDTMRKNKSVWITISSTNFTSPVIEFWERNVLSLSPGIDHPGSLKWDLALCLLLVWLVCFFCIWKGVRSTGKVVYFTATFPFAMLLVLLVRGLTLPGAGAGIKFYLYPDITRLEDPQVWIDAGTQIFFSYAICLGAMTSLGSYNKYKYNSYRDCMLLGCLNSGTSFVSGFAIFSILGFMAQEQGVDIADVAESGPGLAFIAYPKAVTMMPLPTFWSILFFIMLLLLGLDSQFVEVEGQITSLVDLYPSFLRKGYRREIFIAFVCSISYLLGLTMVTEGGMYVFQLFDYYAASGVCLLWVAFFECFVIAWIYGGDNLYDGIEDMIGYRPGPWMKYSWAVITPVLCVGCFIFSLVKYVPLTYNKTYVYPNWAIGLGWSLALSSMLCVPLVIVIRLCQTEGPFLVRVKYLLTPREPNRWAVEREGATPYNSRTVMNGALVKPTHIIVETMMXALSGRRGRRLSCCLLTLDSHRTRFTELYICTRIFFFL

SEQ ID NO: 1251 - protein, 667 aa, Homo Sapiens
  misc_feature (637)..(637): Xaa can be any naturally occurring amino acid
MKKLQGAHLRKPVTPDLLMTPSDQGDVDLDVDFAAHRGNWTGKLDFLLSCIGYCVGLGNVWRFPYRAYTNGGGAFLVPYFLMLAICGIPLFFLELSLGQFSSLGPLAVWKISPLFKGAGAAMLLIVGLVAIYYNMIIAYVLFYLFASLTSDLPWEHCGNWWNTELCLEHRVSKDGNGALPLNLTCTVSPSEEYWSRYVLHIQGSQGIGSPGEIRWNLCLCLLLAWVIVFLCILKGVKSSGKVVYFTATFPYLILLMLLVRGVTLPGAWKGIQFYLTPQFHHLLSSKVWIEAALQIFYSLGVGFGGLLTFASYNTFHQNIYRDTFIVTLGNAITSILAGFAIFSVLGYMSQELGVPVDQVAKAGPGLAFVVYPQAMTMLPLSPFWSFLFFFMLLTLGLDSQFAFLETIVTAVTDEFPYYLRPKKAVFSGLICVAMYLMGLILTTDGGMYWLVLLDDYSASFGLMVVVITTCLAVTRVYGIQRFCRDIHMMLGFKPGLYFRACWLFLSPATLLALMVYSIVKYQPSEYGSYRFPPWAELLGILMGLLSCLMIPAGMLVAVLREEGSLWERLQQASRPAMDWGPSLEENRTGMYVATLAGSQSPKPLMVHMRKYGGITSFENTAIEVDREIAEEEESMMXGRRQAGRRPCPGPHSPFLEACKGQLCPLGF

SEQ ID NO: 1252 - protein, 518 aa, Homo Sapiens
  misc_feature (502)..(502): Xaa can be any naturally occurring amino acid
MVRKPVVSTISKGGYLQGNVNGRLPSLGNKEPPGQEKVQLKRKVTLLRGVSIIIGTIIGAGIFISPKGVLQNTGSVGMSLTIWTVCGVLSLFGALSYAELGTTIKKSGGHYTYILEVFGPLPAFVRVWVELLIIRPAATAVISLAFGRYILEPFFIQCEIPELAIKLITAVGITVVMVLNSMSVSWSARIQIFLTFCKLTAILIIIVPGVMQLIKGQTQNFKDAFSGRDSSITRLPLAFYYGMYAYAGWFYLNFVTEEVENPEKTIPLAICISMAIVTIGYVLTNVAYFTTINAEELLLSNAVAVTFSERLLGNFSLAVPIFVALSCFGSMNGGVFAVSRLFYVASREGHLPEILSMIHVRKHTPLPAVIVLHPLTMIMLFSGDLDSLLNFLSFARWLFIGLAVAGLIYLRYKCPDMHRPFKVPLFIPALFSFTCLFMVALSLYSDPFSTGIGFVITLTGVPAYYLFIIWDKKPRWFRIMSEKITRTLQIILEVVPEEDKLXTNGLEILAICPRGDTK

SEQ ID NO: 1253 - protein, 1079 aa, Homo Sapiens
  misc_feature (1055)..(1055): Xaa can be any naturally occurring amino acid
MEQDTAAVAATVAAADATATIVVIEDEQPGPSTSQEEGAAAAATEATAATEKGEKKKEKNVSSFQLKLAAKAPKSEKEMDPEYEEKMKADRAKRFEFLLKQTELFAHFIQPSAQKSPTSPLNMKLGRPRIKKDEKQSLISAGDYRHRRTEQEEDEELLSESRKTSNVCIRFEVSPSYVKGGPLRDYQIRGLNWLISLYENGVNGILADEMGLGKTLQTIALLGYLKHYRNIPGPHMVLVPKSTLHNWMNEFKRWVPSLRVICFVGDKDARAAFIRDEMMPGEWDVCVTSYEMVIKEKSVFKKFHWRYLVIDEAHRIKNEKSKLSEIVREFKSTNRLLLTGTPLQNNLHELWALLNFLLPDVFNSADDFDSWFDTKNCLGDQKLVERLHAVLKPFLLRRIKTDVEKSLPPKKEIKIYLGLSKMQREWYTKILMKDIDVLNSSGKMDKMRLLNILMQLRKCCNHPYLFDGAEPGPPYTTDEHIVSNSGKMVVLDKLLAKLKEQGSRVLIFSQMTRLLDILEDYCMWRGYEYCRLDGQTPHEEREDKFLEVEFLGQREAIEAFNAPNSSKFIFMLSTRAGGLGINLASADVVILYDSDWNPQVDLQAMDRAHRIGQKKPVRVFRLITDNTVEERIVERAEIKLRLDSIVIQQGRLIDQQSNKLAKEEMLQMIRHGATHVFASKESELTDEDITTILERGEKKTAEMNERLQKMGESSLRNFRMDIEQSLYKFEGEDYREKQKLGMVEWIEPPKRERKANYAVDAYFREALRVSEPKIPKAPRPPKQPNVQDFQFFPPRLFELLEKEILYYRKTIGYKVPRNPDIPNPALAQREEQKKIDGAEPLTPEETEEKEKLLTQGFTNWTKRDFNQFIKANEKYGRDDIDNIAREVEGKSPEEVMEYSAVFWERCNELQDIEKIMAQIERGEARIQRRISIKKALDAKIARYKAPFHQLRIQYGTSKGKNYTEEEDRFLICMLHKMGFDRENVYEELRQCVRNAPQFRFDWFIKSRTAMEFQRRCNTLISLIEKENMEIEERERAEKKKRATKTPMVKFSAFSXLLDLTLLGHLKCAYWSRTLNLFPF

SEQ ID NO: 1254 - protein, 374 aa, Homo Sapiens
  misc_feature (369)..(369): Xaa can be any naturally occurring amino acid
MGTPPGLQTDCEALLSRFQETDSVRFEDFTELWRNMKFGTIFCGRMRNLEKNMFTKEALALAWRYFLPPYTFQIRVGALYLLYGLYNTQLCQPKQKIRVALKDWDEVLKFQQDLVNAQHFDAAYIFRKLRLDRAFHFTAMPKLLSYRMKKKIHRAEVTEEFKDPSDRVMKLITSDVLEEMLNVHDHYQNMKHVISVDKSKPDKALSLIKDDFFDNIKNIVLEHQQWHKDRKNPSLKSKTNDGEEKMEGNSQETERCERAESLAKIKSKAFSVVIQASKSRRHRQVKLDSSDSDSASGQGQVKATRKKEKKERLKPAGRKMSLRNKGNVQNIHKEDKPLSLSMPVITEEEENESLSGTEFTASKKRRKHXTKSLV

SEQ ID NO: 1255 - protein, 470 aa, Homo Sapiens
  misc_feature (451)..(451): Xaa can be any naturally occurring amino acid
MEQAPPDPERQLQPAPLEPLGSPDAGLGAAVGKEAEGAGEESSGVDTMTHNNFWLKKIEISVSEAEKRTGRNAMNMQETYTAYLIETRSVEHTDGQSVLTDSLWRRYSEFELLRSYLLVYYPHIVVPPLPEKRAEFVWHKLSADNMDPDFVERRRIGLENFLLRIASHPILCRDKIFYLFLTQEGNWKETVNETGFQLKADSRLKALNATFRVKNPDKRFTDLKHYSDELQSVISHLLRVRARVADRLYGVYKVHGNYGRVFSEWSAIEKEMGDGLQSAGHHMDVYASSIDDILEDEEHYADQLKEYLFYAEALRAVCRKHELMQYDLEMAAQDLASKKQQCEELVTGTVRTFSLKGMTTKLFGQETPEQREARIKVLEEQINEGEQQLKSKNLEGREFVKNAWADIERFKEQKNRDLKEALISYAVMQISMCKKGIQVWTNAKECFSKMXSCELNFSSIKVPQNRSTSK

SEQ ID NO: 1256 - protein, 448 aa, Homo Sapiens
  misc_feature (401)..(401): Xaa can be any naturally occurring amino acid
MATLLLLLGVLVVSPDALGSTTAVQTPTSGEPLVSTSEPLSSKMYTTSITSDPKADSTGDQTSALPPSTSINEGSPLWTSIGASTGSPLPEPTTYQEVSIKMSSVPQETPHATSHPAVPITANSLGSHTVTGGTITTNSPETSSRTSGAPVTTAASSLETSRGTSGPPLTMATVSLETSKGTSGPPVTMATDSLETSTGTTGPPVTMTTGSLEPSSGASGPQVSSVKLSTMMSPTTSTNASTVPFRNPDENSRGMLPVAVLVALLAVIVLVALLLLWRRRQKRRTGALVLSRGGKRNGVVDAWAGPAQVPEEGAVTVTVGGSGGDKGSGFPDGEGSSRRPTLTTFFGRRKSRQGSLAMEELKSGSGPSLKGEEEPLVASEDGAVDAPAPDEPEGGDGAAPXVSVNSEAGGRNLSQPPAPSLSPSHCPLAPMFPPGTLILTRISFFFFF

SEQ ID NO: 1257 - protein, 2511 aa, Homo Sapiens
  misc_feature (2473)..(2473): Xaa can be any naturally occurring amino acid
MDPSGVKVLETAEDIQERRQQVLDRYHRFKELSTLRRQKLEDSYRFQFFQRDAEELEKWIQEKLQIASDENYKDPTNLQGKLQKHQAFEAEVQANSGAIVKLDETGNLMISEGHFASETIRTRLMELHRQWELLLEKMREKGIKLLQAQKLVQYLRECEDVMDWINDKEAIVTSEELGQDLEHVEVLQKKFEEFQTDMAAHEERVNEVNQFAAKLIQEQHPEEELIKTKQDEVNAAWQRLKGLALQRQGKLFGAAEVQRFNRDVDETISWIKEKEQLMASDDFGRDLASVQALLRKHEGLERDLAALEDKVKALCAEADRLQQSHPLSATQIQVKREELITNWEQIRTLAAERHARLNDSYRLQRFLADFRDLTSWVTEMKALINADELASDVAGAEALLDRHQEHKGEIDAHEDSFKSADESGQALLAAGHYASDEVREKLTVLSEERAALLELWELRRQQYEQCMDLQLFYRDTEQVDNWMSKQEAFLLNEDLGDSLDSVEALLKKHEDFEKSLSAQEEKITALDEFATKLIQNNHYAMEDVATRRDALLSRRNALHERAMRRRAQLADSFHLQQFFRDSDELKSWVNEKMKTATDEAYKDPSNLQGKVQKHQAFEAELSANQSRIDALEKAGQKLIDVNHYAKDEVAARMNEVISLWKKLLEATELKGIKLREANQQQQFNRNVEDIELWLYEVEGHLASDDYGKDLTNVQNLQKKHALLEADVAAHQDRIDGITIQARQFQDAGHFDAENIKKKQEALVARYEALKEPMVARKQKLADSLRLQQLFRDVEDEETWIREKEPIAASTNRGKDLIGVQNLLKKHQALQAEIAGHEPRIKAVTQKGNAMVEEGHFAAEDVKAKLHELNQKWEALKAKASQRRQDLEDSLQAQQYFADANEAESWMREKEPIVGSTDYGKDEDSAEALLKKHEALMSDLSAYGSSIQALREQAQSCRQQVAPTDDETGKELVLALYDYQEKSPREVTMKKGDILTLLNSTNKDWWKVEVNDRQGFVPAAYVKKLDPAQSASRENLLEEQGSIALRQEQIDNQTRITKEAGSVSLRMKQVEELYHSLLELGEKRKGMLEKSCKKFMLFREANELQQWINEKEAALTSEEVGADLEQVEVLQKKFDDFQKDLKANESRLKDINKVAEDLESEGLMAEEVQAVQQQEVYGMMPRDETDSKTASPWKSARLMVHTVATFNSIKELNERWRSLQQLAEERSQLLGSAHEVQRFHRDADETKEWIEEKNQALNTDNYGHDLASVQALQRKHEGFERDLAALGDKVNSLGETAERLIQSHPESAEDLQEKCTELNQAWSSLGKRADQRKAKLGDSHDLQRFLSDFRDLMSWINGIRGLVSSDELAKDVTGAEALLERHQEHRTEIDARAGTFQAFEQFGQQLLAHGHYASPEIKQKLDILDQERADLEKAWVQRRMMLDQCLELQLFHRDCEQAENWMAAREAFLNTEDKGDSLDSVEALIKKHEDFDKAINVQEEKIAALQAFADQLIAAGHYAKGDISSRRNEVLDRWRRLKAQMIEKRSKLGESQTLQQFSRDVDEIEAWISEKLQTASDESYKDPTNIQSKHQKHQAFEAELHANADRIRGVIDMGNSLIERGACAGSEDAVKARLAALADQWQFLVQKSAEKSQKLKEANKQQNFNTGIKDFDFWLSEVEALLASEDYGKDLASVNNLLKKHQLLEADISAHEDRLKDLNSQADSLMTSSAFDTSQVKDKRDTINGRFQKIKSMAASRRAKLNESHRLHQFFRDMDDEESWIKEKKLLVGSEDYGRDLTGVQNLRKKHKRLEAELAAHEPAIQGVLDTGKKLSDDNTIGKEEIQQRLAQFVEHWKELKQLAAARGQRLEESLEYQQFVANVEEEEAWINEKMTLVASEDYGDTLAAIQGLLKKHEAFETDFTVHKDRVNDVCTNGQDLIKKNNHHEENISSKMKGLNGKVSDLEKAAAQRKAKLDENSAFLQFNWKADVVESWIGEKENSLKTDDYGRDLSSVQTLLTKQETFDAGLQAFQQEGIANITALKDQLLAAKHVQSKAIEARHASLMKRWSQLLANSAARKKKLLEAQSHFRKVEDLFLTFAKKASAFNSWFENAEEDLTDPVRCNSLEEIKALREAHDAFRSSLSSAQADFNQLAELDRQIKSFRVASNPYTWFTMEALEETWRNLQKIIKERELELQKEQRRQEENDKLRQEFAQHANAFHQWIQETRTYLLDGSCMVEESGTLESQLEATKRKHQEIRAMRSQLKKIEDLGAAMEEALILDNKYTEHSTVGLAQQWDQLDQLGMRMQHNLEQQIQARNTTGVTEEALKEFSMMFKHFDKDKSGRLNHQEFKSCLRSLGYDLPMVEEGEPDPEFEAILDTVDPNRDGHVSLQEYMAFMISRETENVKSSEEIESAFRALSSEGKPYVTKEELYQNLTREQADYCVSHMKPYVDGKGRELPTAFDYVEFTRSLFVNXATPWVTHPSLLALRRLAACPLLCVLSLSTVTLSLLSLE

SEQ ID NO: 1258 - protein, 2571 aa, Homo Sapiens
  misc_feature (2565)..(2565): Xaa can be any naturally occurring amino acid
MAQVPGEVDNMEGLPAPNNNPAARWESPDRGWEREQPAASTAAASLFECSRIKALADEREAVQKKTFTKWVNSHLARVGCHIGDLYVDLRDGFVLTRLLEVLSGEQLPRPTRGRMRIHSLENVDKALQFLKEQRVHLENVGSHDIVDGNHRLTLGLVWTIILRFQIQVIKIETEDNRETRSAKDALLLWCQMKTAGYPEVNIQNFTTSWRDGLAFNALIHRHRPDLVDFSKLTKSNANYNLQRAFRTAEQHLGLARLLDPEDVNMEAPDEKSIITYVVSFYHYFSKMKALAVEGKRIGKVLDQVLEVGKIIERYEELAAELLAWIHRTVGLISNQKFANSLSGVQQQLQAFTAYCTLEKPVKFQEKGNLEVLLFSIQSKLRACNRRLFVPREGCGIWDIDKAWGELEKAEHEREAALRAELIRQEKLELLAQRFDHKVAMRESWLNENQRLVSQDNFGYELPAVEAAMKKHEAIEADIAAYEERVQGVAELAQALAAEGYYDIRRVAAQRDSVLRQWALLTGLVGARRTRLEQNLALQKVFQEMVYMVDWMEEMQAQLLSRECGQHLVEADDLLQKHGLLEGDIAAQSERVEALNAAALRFSQLQGYQPCDPQVICNRVNHVHGCLAELQEQAARRRAELEASRSLWALLQELEEAESWARDKERLLEAAGGGGAAGAAGAAGTAGGAHDLSSTARLLAQHKILQGELGGRRALLQQALRCGEELVAAGGAVGPGADTVHLVGLAERAASARRRWQRLEEAAARRERRLQEARALHQFGADLDGLLDWLRDAYRLAAAGDFGHDEASSRRLARQHRALTGEVEAHRGPVSGLRRQLATLGGASGAGPLVVALQVRVVEAEQLFAEVTEVAALRRQWLRDALAVYRMFGEVHACELWIGEKEQWLLSMRVPDSLDDVEVVQHRFESLDQEMNSLMGRVLDVNHTVQELVEGGHPSSDEVRSCQDHLNSRWNRIVELVEQRKEEMSAVLLVENHVLEVAEVRAQVREKRRAVESAPRAGGALQWRLSGLEAALQALEPRQAALLEEAALLAERFPAQAARLHQGAEELGAEWGALASAAQACGEAVAAAGRLQRFLHDLDAFLDWLVRAQEAAGGSEGPLPNSLEEADALLARHAALKEEVDQREEDYARIVAASEALLAADGAELGPGLALDEWLPHLELGWHKLLGLWEARREALVQAHIYQLFLRDLRQALVVLRNQEMALSGAELPGTVESVEEALKQHRDFLTTMELSQQKMQVAVQAAEGLLRQGNIYGEQAQEAVTRLLEKNQENQLRAQQWMQKLHDQLELQHFLRDCHELDGWIHEKMLMARDGTREDNHKLHKRWLRHQAFMAELAQNKEWLEKIEREGQQLMQEKPELAASVRKKLGEIRQCWAELESTTQAKARQLFEASKADQLVQSFAELDKKLLHMESQLQDVDPGGDLATVNSQLKKLQSMESQVEEWYREVGELQAQTAALPLEPASKELVGERQNAVGERLVRLLEPLQERRRLLLASKELHQVAHDLDDELAWVQERLPLAMQTERGNGLQAVQQHIKKNQGLRREIQAHGPRLEEVLERAGALASLRSPEAEAVRRGLEQLQSAWAGLREAAERRQQVLDAAFQVEQYYFDVAEVEAWLGEQELLMMSEDKGKDEQSTLQLLKKHLQLEQGVENYEESIAQLSRQCRALLEMGHPDSEQISRRQSQVDRLYVALKELGEERRVALEQQYWLYQLSRQVSELEHWIAEKEVVAGSPELGQDFEHVSVLQEKFSEFASETGMAGRERLAAVNQMVDELIECGHTAAATMAEWKDGLNEAWAELLELMGTRAQLLAASRELHKFFSDARELQGQIEEKRRRLPRLTTPPEPRPSASSMQRTLRAFEHDLQLLVSQVRQLQEGAAQLRTVYAGEHAEAIASREQEVLQGWKELLSACEDARLHVSSTADALRFHSQVRDLLSWMDGIASQIGAADKPRDVSSVEVLMNYHQGLKTELEARVPELTTCQELGRSLLLNKSAMADEIQAQLDKLGTRKEEVSEKWDRHWEWLQQMLEVHQFAQEAVVADAWLTAQEPLLQSRELGSSVDEVEQLIRRHEAFRKAAAAWEERFSSLRRLTTIEKIKAEQSKQPPTPLLGRKFFGDPTELAAKAAPLLRPGGYERGLEPLARRASDTLSAEVRTRVGYVRQELKPERLQPRIDRLPEIPGRVEPAALPAAPEDAAETPATPAAAEQVRPRPERQESADRAEELPRRRRPERQESVDQSEEAARRRRPERQESAEHEAAHSLTLGRYEQMERRRERRERRLERQESSEQEMPIRGDLVKGKATLADIVEQLQEKEAGPGLPAGPSLPQPRELPPGRLPNGLELPERTPRPDRPRARDRPKPRRRPRPREGGEGGGSRRSRSAPAQGGSAPAPPPPPTHTVQHEGFLLRKRELDANRKSSNRSWVSLYCVLSKGELGFYKDSKGPASGSTHGGEPLLSLHKATSEVASDYKKKKHVFKLQTQDGSEFLLQAKDEEEMNGWLEAVASSVAEHAEIARWGQTLPTTSSTDEGNPKREGGDRRASGRRKXLPTPRT

SEQ ID NO: 1259 - protein, 500 aa, Homo Sapiens
  misc_feature (474)..(474): Xaa can be any naturally occurring amino acid
MATATEQWVLVEMVQALYEAPAYHLILEGILILWIIRLLFSKTYKLQERSDLTVKEKEELIEEWQPEPLVPPVPKDHPALNYNIVSGPPSHKTVVNGKECINFASFNFLGLLDNPRVKAAALASLKKYGVGTCGPRGFYGTFDVHLDLEDRLAKFMKTEEAIIYSYGFATIASAIPAYSKRGDIVFVDRAACFAIQKGLQASRSDIKLFKHNDMADLERLLKEQEIEDQKNPRKARVTRRFIVVEGLYMNTGTICPLPELVKLKYKYKARIFLEESLSFGVLGEHGRGVTEHYGINIDDIDLISANMENALASIGGFCCGRSFVIDHQRLSGQGYCFSASLPPLLAAAAIEALNIMEENPGIFAVLKEKCGQIHKALQGISGLKVVGESLSPAFHLQLEESTGSREQDVRLLQEIVDQCMNRSIALTQARYLEKEEKCLPPPSIRVVVTVEQTEEELERAASTIKEVAQAVLLXAESRDHGLLPHNTQRGLKTPAGHGVA

SEQ ID NO: 1260 - protein, 672 aa, Homo Sapiens
  misc_feature (639)..(639): Xaa can be any naturally occurring amino acid
MLDFFTIFSKGGLVLWCFQGVSDSCTGPVNALIRSVLLQERGGNNSFTHEALTLKYKLDNQFELVFVVGFQKILTLTYVDKLIDDVHRLFRDKYRTEIQQQSALSLLNGTFDFQNDFLRLLREAEESSKIRAPTTMKKFEDSEKAKKPVRSMIETRGEKPKEKAKNSKKKGAKKEGSDGPLATSKPVPAEKSGLPVGPENGVELSKEELIRRKREEFIQKHGRGMEKSNKSTKSDAPKEKGKKAPRVWELGGCANKEVLDYSTPTTNGTPEAALSEDINLIRGTGSGGQLQDLDCSSSDDEGAAQNSTKPSATKGTLGGMFGMLKGLVGSKSLSREDMESVLDKMRDHLIAKNVAADIAVQLCESVANKLEGKVMGTFSTVTSTVKQALQESLVQILQPQRRVDMLRDIMDAQRRQRPYVVTFCGVNGVGKSTNLAKISFWLLENGFSVLIAACDTFRAGAVEQLRTHTRRLSALHPPEKHGGRTMVQLFEKGYGKDAAGIAMEAIAFARNQGFDVVLVDTAGRMQDNAPLMTALAKLITVNTPDLVLFVGEALVGNEAVDQLVKFNRALADHSMAQTPRLIDGIVLTKFDTIDDKVGAAISMTYITSKPIVFVGTGQTYCDLRSLNAKAVVAALMKAXRGSCPIPNRRFPHKPFFLYQECALEYVSNLSSV

SEQ ID NO: 1261 - protein, 479 aa, Homo Sapiens
  misc_feature (465)..(465): Xaa can be any naturally occurring amino acid
MGSPAHRPALLLLLPPLLLLLLLRVPPSRSFPGSGDSPLEDDEVGYSHPRYKDTPWCSPIKVKYGDVYCRAPQGGYYKTALGTRCDIRCQKGYELHGSSLLICQSNKRWSDKVICKQKRCPTLAMPANGGFKCVDGAYFNSRCEYYCSPGYTLKGERTVTCMDNKAWSGRPASCVDMEPPRIKCPSVKERIAEPNKLTVRVSWETPEGRDTADGILTDVILKGLPPGSNFPEGDHKIQYTVYDRAENKGTCKFRVKVRVKRCGKLNAPENGYMKCSSDGDNYGATCEFSCIGGYELQGSPARVCQSNLAWSGTEPTCAAMNVNVGVRTAAALLDQFYEKRRLLIVSTPTARNLLYRLQLGMLQQAQCGLDLRHITVVELVGVFPTLIGRIGAKIMPPALALQLRLLLRIPLYSFSMVLVDKHGMDKERYVSLVMPVALFNLIDTFPLRKEEMVLQAEMSQTCNTXHDGSSLGNSSSLST

SEQ ID NO: 1262 - protein, 335 aa, Homo Sapiens
  misc_feature (330)..(330): Xaa can be any naturally occurring amino acid
MVSKSRWKLLAMLALVLVVMVWYSISREDSFYFPIPEKKEPCLQGEAESKASKLFGNYSRDQPIFLRLEDYFWVKTPSAYELPYGTKGSEDLLLRVLAITSSSIPKNIQSLRCRRCVVVGNGHRLRNSSLGDAINKYDVVIRLNNAPVAGYEGDVGSKTTMRLFYPESAHFDPKVENNPDTLLVLVAFKAMDFHWIETILSDKKRVRKGFWKQPPLIWDVNPKQIRILNPFFMEIAADKLLSLPMQQPRKIKQKPTTGLLAITLALHLCDLVHIAGFGYPDAYNKKQTIHYYEQITLKSMAGSGHNVSQEALAIKRMLEMGAIKNLTSFXPGQEL

SEQ ID NO: 1263 - protein, 772 aa, Homo Sapiens
  misc_feature (718)..(718): Xaa can be any naturally occurring amino acid
MTMTANKNSSITHGAGGTKAPRGTLSRKSFEFEDASSLQSLYPSSPTENGTENQPKFGSKSTLEENAYEDIVGDLPKENPYEDVDLKSRRAGRKSQQLSENSLDSLHRMWSPQDRKYNSPPTQLSLKPNSQSLRSGNWSERKSHRLPRLPKRHSHDDMLLLAQLSLPSSPSSLNEDSLSTTSELLSSRRARRIPKLVQRINSIYNAKRGKKRLKKLSMSSIETASLRDENSESESDSDDRFKAHTQRLVHIQSMLKRAPSYRTLELELLEWQERELFEYFVVVSLKKKPSRNTYLPEVSYQFPKLDRPTKQMREAEERLKAIPQFCFPDAKDWLPVSEYSSETFSFMLTGEDGSRRFGYCRRLLPSGKGPRLPEVYCVISRLGCFGLFSKVLDEVERRRGISAALVYPFMRSLMESPFPAPGKTIKVKTFLPGAGNEVLELRRPMDSRLEHVDFECLFTCLSVRQLIRIFASLLLERRVIFVADKLSTLSSCSHAVVALLYPFSWQHTFIPVLPASMIDIVCCPTPFLVGLLSSSLPKLKELPVEEALMVNLGSDRFIRQMDDEDTLLPRKLQAALEQALERKNELISQDSDSDSDDECNTLNGLVSEVFIRFFVETVGHYSLFLTQSEKGERAFQREAFRKSVASKSIRRFLEVFMESQMFAGFIQDRELRKCRAKGLFEQRVEQYLEELPDTEQSGMNKFLRGLGNKMKFLHKKNXASFSVAESSALQSLKPGEKAQPGTLWAAVAPLPPQILSSKPAHLCLHHIPGYCL

SEQ ID NO: 1264 - protein, 869 aa, Homo Sapiens
  misc_feature (852)..(852): Xaa can be any naturally occurring amino acid
MAQWEMLQNLDSPFQDQLHQLYSHSLLPVDIRQYLAVWIEDQNWQEAALGSDDSKATMLFFHFLDQLNYECGRCSQDPESLLLQHNLRKFCRDIQPFSQDPTQLAEMIFNLLLEEKRILIQAQRAQLEQGEPVLETPVESQQHEIESRILDLRAMMEKLVKSISQLKDQQDVFCFRYKIQAKGKTPSLDPHQTKEQKILQETLNELDKRRKEVLDASKALLGRLTTLIELLLPKLEEWKAQQQKACIRAPIDHGLEQLETWFTAGAKLLFHLRQLLKELKGLSCLVSYQDDPLTKGVDLRNAQVTELLQRLLHRAFVVETQPCMPQTPHRPLILKTGSKFTVRTRLLVRLQEGNESLTVEVSIDRNPPQLQGFRKFNILTSNQKTLTPEKGQSQGLIWDFGYLTLVEQRSGGSGKGSNKGPLGVTEELHIISFTVKYTYQGLKQELKTDTLPVVIISNMNQLSIAWASVLWFNLLSPNLQNQQFFSNPPKAPWSLLGPALSWQFSSYVGRGLNSDQLSMLRNKLFGQNCRTEDPLLSWADFTKRESPPGKLPFWTWLDKILELVHDHLKDLWNDGRIMGFVSRSQERRLLKKTMSGTFLLRFSESSEGGITCSWVEHQDDDKVLIYSVQPYTKEVLQSLPLTEIIRHYQLLTEENIPENPLRFLYPRIPRDEAFGCYYQEKVNLQERRKYLKHRLIVVSNRQVDELQQPLELKPEPELESLELELGLVPEPELSLDLEPLLKAGLDLGPELESVLESTLEPVIEPTLCMVSQTVPEPDQGPVSQPVPEPDLPCDLRHLNTEPMEIFRNCVKIEEIMPNGDPLLAGQNTVDEVYVSRPSHFYTDGPLMPSDFXEPHFLCSFHISCPSYSS

SEQ ID NO: 1265 - protein, 834 aa, Homo Sapiens
  misc_feature (770)..(770): Xaa can be any naturally occurring amino acid
MAQWNQLQQLDTRYLEQLHQLYSDSFPMELRQFLAPWIESQDWAYAASKESHATLVFHNLLGEIDQQYSRFLQESNVLYQHNLRRIKQFLQSRYLEKPMEIARIVARCLWEESRLLQTAATAAQQGGQANHPTAAVVTEKQQMLEQHLQDVRKRVQDLEQKMKVVENLQDDFDFNYKTLKSQGDMQDLNGNNQSVTRQKMQQLEQMLTALDQMRRSIVSELAGLLSAMEYVQKTLTDEELADWKRRQQIACIGGPPNICLDRLENWITSLAESQLQTRQQIKKLEELQQKVSYKGDPIVQHRPMLEERIVELFRNLMKSAFVVERQPCMPMHPDRPLVIKTGVQFTTKVRLLVKFPELNYQLKIKVCIDKDSGDVAALRGSRKFNILGTNTKVMNMEESNNGSLSAEFKHLTLREQRCGNGGRANCDASLIVTEELHLITFETEVYHQGLKIDLETHSLPVVVISNICQMPNAWASILWYNMLTNNPKNVNFFTKPPIGTWDQVAEVLSWQFSSTTKRGLSIEQLTTLAEKLLGPGVNYSGCQITWAKFCKENMAGKGFSFWVWLDNIIDLVKKYILALWNEGYIMGFISKERERAILSTKPPGTFLLRFSESSKEGGVTFTWVEKDISGKTQIQSVEPYTKQQLNNMSFAEIIMGYKIMDATNILVSPLVYLYPDIPKEEAFGKYCRPESQEHPEADPGAAPYLKTKFICVTPTTCSNTIDLPMSPRTLDSLMQFGNNGEGAEPSAGGQFESLTFDMELTSECATSPMXGAENGSCRKIRLRRLPAFCHPSHSQTPDHLKLLTLWFQIFFNLLLLLSLSNLGTFKNREMSECG

SEQ ID NO: 1266 - protein, 279 aa, Homo Sapiens
  misc_feature (256)..(256): Xaa can be any naturally occurring amino acid
MSMEDPFFVVKGEVQKAVNTAQGLFQRWTELLQDPSTATREEIDWTTNELRNNLRSIEWDLEDLDETISIVEANPRKFNLDATELSIRKAFITSTRQVVRDMKDQMSTSSVQALAERKNRQALLGDSGSQNWSTGTTDKYGRLDRELQRANSHFIEEQQAQQQLIVEQQDEQLELVSGSIGVLKNMSQRIGGELEEQAVMLEDFSHELESTQSRLDNVMKKLAKVSHMTSDRRQWCAIAILFAVLLVVLILFLVLXRRGLWVRVPPAYEPRGGGEAEHV

SEQ ID NO: 1267 - protein, 286 aa, Homo Sapiens
  misc_feature (262)..(262): Xaa can be any naturally occurring amino acid
MSYTPGVGGDPTQLAQRISSNIQKITQCSVEIQRTLNQLGTPQDSPELRQQLQQKQQYTNQLAKETDKYIKEFGSLPTTPSEQRQRKIQKDRLVAEFTTSLTNFQKVQRQAAEREKEFVARVRASSRVSGSFPEDSSKERNLVSWESQTQPQVQVQDEEITEDDLRLIHERESSIRQLEADIMDINEIFKDLGMMIHEQGDVIDSIEANVENAEVHVQQANQQLSRAADYQRKSRKTLCIIILILVIGVAIISLIIWGLNHXSYKGAHCRTTLSKLCRKIPVIMFF

SEQ ID NO: 1268 - protein, 141 aa, Homo Sapiens
  misc_feature (104)..(104): Xaa can be any naturally occurring amino acid
MSEEKPKEGVKTENDHINLKVAGQDGSVVQFKIKRHTPLSKLMKAYCERQGLSMRQIRFRFDGQPINETDTPAQLEMEDEDTIDVFQQQTGGVPESSLAGHSFXRARPQPGPSILALLLNGEHVTMPTTKVSAETRGHSPR

SEQ ID NO: 1269 - protein, 373 aa, Homo Sapiens
  misc_feature (362)..(362): Xaa can be any naturally occurring amino acid
MASLLAKDAYLQSLAKKICSHSAPEQQARTRAGKTQGSETAGPPKKKRKKTQKKFRKREEKAAEHKAKSLGEKSPAASGARRPEAAKEEAAWASSSAGNPADGLATEPESVFALDVLRQRLHEKIQEARGQGSAKELSPAALEKRRRRKQERDRKKRKRKELRAKEKARKAEEATEAQEVVEATPEGACTEPREPPGLIFNKVEVSEDEPASKAQRRKEKRQRVKGNLTPLTGRNYRQLLERLQARQSRLDELRGQDEGKAQELEAKMKWTNLLYKAEGVKIRDDERLLQEALKRKEKRRAQRQRRWEKRTAGVVEKMQQRQDRRRQNLRRKKAARAERRLLRARKKGRILPQDLERAGLVXVFPTWGRRLPS

SEQ ID NO: 1270 - protein, 596 aa, Homo Sapiens
  misc_feature (586)..(586): Xaa can be any naturally occurring amino acid
MGSLKEELLKAIWHAFTALDQDHSGKVSKSQLKVLSHNLCTVLKVPHDPVALEEHFRDDDEGPVSNQGYMPYLNRFILEKVQDNFDKIEFNRMCWTLCVKKNLTKNPLLITEEDAFKIWVIFNFLSEDKYPLIIVSEEIEYLLKKLTEAMGGGWQQEQFEHYKINFDDSKNGLSAWELIELIGNGQFSKGMDRQTVSMAINEVFNELILDVLKQGYMMKKGHRRKNWTERWFVLKPNIISYYVSEDLKDKKGDILLDENCCVESLPDKDGKKCLFLVKCFDKTFEISASDKKKKQEWIQAIHSTIHLLKLGSPPPHKEARQRRKELRKKQLAEQEELERQMKELQAANESKQQELEAVRKKLEEAASRAAEEEKKRLQTQVELQARFSTELEREKLIRQQMEEQVAQKSSELEQYLQRVRELEDMYLKLQEALEDERQARQDEETVRKLQARLLEEESSKRAELEKWHLEQQQAIQTTEAEKQELENQRVLKEQALQEAMEQLEQLELERKQALEQYEEVKKKLEMATNKTKSWKDKVAHHEGLIRLIEPGSKNPHLITNWGPAAFTEAELEEREKNWKEKKTTEXLSLLAVTSVM

SEQ ID NO: 1271 - protein, 735 aa, Homo Sapiens
  misc_feature (706)..(706): Xaa can be any naturally occurring amino acid
MNYLRRRLSDSNFMANLPNGYMTDLQRPQPPPPPPGAHSPGATPGPGTATAERSSGVAPAASPAAPSPGSSGGGGFFSSLSNAVKQTTAAAAATFSEQVGGGSGGAGRGGAASRVLLVIDEPHTDWAKYFKGKKIHGEIDIKVEQAEFSDLNLVAHANGGFSVDMEVLRNGVKVVRSLKPDFVLIRQHAFSMARNGDYRSLVIGLQYAGIPSVNSLHSVYNFCDKPWVFAQMVRLHKKLGTEEFPLIDQTFYPNHKEMLSSTTYPVVVKMGHAHSGMGKVKVDNQHDFQDIASVVALTKTYATAEPFIDAKYDVRVQKIGQNYKAYMRTSVSGNWKTNTGSAMLEQIAMSDRYKLWVDTCSEIFGGLDICAVEALHGKDGRDHIIEVVGSSMPLIGDHQDEDKQLIVELVVNKMAQALPRQRQRDASPGRGSHGQTPSPGALPLGRQTSQQPAGPPAQQRPPPQGGPPQPGPGPQRQGPPLQQRPPPQGQQHLSGLGPPAGSPLPQRLPSPTSAPQQPASQAAPPTQGQGRQSRPVAGGPGAPPAARPPASPSPQRQAGPPQATRQTSVSGPAPPKASGAPPGGQQRQGPPQKPPGPAGPTRQASQAGPVPRTGPPTTQQPRPSGPGPAGRPKPQLAQKPSQDVPPPATAAAGGPPHPQLNKSQSLTNAFNLPEPAPPRPSLSQDEVKAETIRSLRKSFASLFSDXYPTLRTPKSLGNPSLGPESISHFWSLQIP

SEQ ID NO: 1272 - protein, 252 aa, Homo Sapiens
  misc_feature (235)..(235): Xaa can be any naturally occurring amino acid
MHIPKSLQELANSEAVQFLRRPKTITRVFEGVFSLIVFSSLLTDGYQNKMESPQLHCILNSNSVACSFAVGAGFLAFLSCLAFLVLDTQETRIAGTRFKTAFQLLDFILAVLWAVVWFMGFCFLANQWQHSPPKEFLLGSSSAQAAIAFTFFSILVWIFQAYLAFQDLRNDAPVPYKRFLDEGGMVLTTLPLPSANSPVNMPTTGPNSLSYASSALSPCLTAPKSPRLAMMPDNXISLSKSIKRESSLQKGF

SEQ ID NO: 1273 - protein, 364 aa, Homo Sapiens
  misc_feature (350)..(350): Xaa can be any naturally occurring amino acid
MSKSKDDAPHELESQFILRLPPEYASTVRRAVQSGHVNLKDRLTIELHPDGRHGIVRVDRVPLASKLVDLPCVMESLKTIDKKTFYKTADICQMLVSTVDGDLYPPVEEPVASTDPKASKKKDKDKEKKFIWNHGITLPLKNVRKRRFRKTAKKKYIESPDVEKEVKRLLSTDAEAVSTRWEIIAEDETKEAENQGLDISSPGMSGHRQGHDSLEHDELREIFNDLSSSSEDEDETQHQDEEDINIIDTEEDLERQLQDKLNESDEQHQENEGTNQLVMGIQKQIDNMKGKLQETQDRAKRQEDLIMKVENLALKNRFQAVLDELKQKEDREKEQLSSLQEELESLLEKXKELIFNFSLQTGQH

SEQ ID NO: 1274 - protein, 213 aa, Homo Sapiens
  misc_feature (200)..(200): Xaa can be any naturally occurring amino acid
MANRGPAYGLSREVQQKIEKQYDADLEQILIQWITTQCRKDVGRPQPGRENFQNWLKDGTVLCELINALYPEGQAPVKKIQASTMAFKQMEQISQFLQAAERYGINTTDIFQTVDLWEGKNMACVQRTLMNLGGLAVARDDGLFSGDPNWFPKKSKENPRNFSDNQLQEGKNVIGLQMGTNRGASQAGMTGYGMPRQILXSHPRPCPCPPTNG

SEQ ID NO: 1275 - protein, 531 aa, Homo Sapiens
  misc_feature (455)..(455): Xaa can be any naturally occurring amino acid
MDPYMIQMSSKGNLPSILDVHVNVGGRSSVPGKMKGRKARWSVRPSDMAKKTFNPIRAIVDNMKVKPNPNKTMISLSIGDPTVFGNLPTDPEVTQAMKDALDSGKYNGYAPSIGFLSSREEIASYYHCPEAPLEAKDVILTSGCSQAIDLCLAVLANPGQNILVPRPGFSLYKTLAESMGIEVKLYNLLPEKSWEIDLKQLEYLIDEKTACLIVNNPSNPCGSVFSKRHLQKILAVAARQCVPILADEIYGDMVFSDCKYEPLATLSTDVPILSCGGLAKRWLVPGWRLGWILIHDRRDIFGNEIRDGLVKLSQRILGPCTIVQGALKSILCRTPGEFYHNTLSFLKSNADLCYGALAAIPGLRPVRPSGAMYLMVGIEMEHFPEFENDVEFTERLVAEQSVHCLPATCFEYPNFIRVVITVPEVMMLEACSRIQEFCEQHYHCAEGSQEECDKXACIHSPEDVSHLGKAGLGLAAPQGLRWPYWERGLKCTMSRVQDCSCFSPSTTTPTLRSSSFTSQITPLLCAARVTH

SEQ ID NO: 1276 - protein, 1328 aa, Homo Sapiens
  misc_feature (1299)..(1299): Xaa can be any naturally occurring amino acid
MEPPSCIQDEPFPHPLEPEPGVSAQPGPGKPSDKRFRLWYVGGSCLDHRTTLPMLPWLMAEIRRRSQKPEAGGCGAPAAREVILVLSAPFLRCVPAPGAGASGGTSPSATQPNPAVFIFEHKAQHISRFIHNSHDLTYFAYLIKAQPDDPESQMACHVFRATDPSQVPDVISSIRQLSKAAMKEDAKPSKDNEDAFYNSQKFEVLYCGKVTVTHKKAPSSLIDDCMEKFSLHEQQRLKIQGEQRGPDPGEDLADLEVVVPGSPGDCLPEEADGTDTHLGLPAGASQPALTSSRVCFPERILEDSGFDEQQEFRSRCSSVTGVQRRVHEGSQKSQPRRRHASAPSHVQPSDSEKNRTMLFQVGRFEINLISPDTKSVVLEKNFKDISSCSQGIKHVDHFGFICRESPEPGLSQYICYVFQCASESLVDEVMLTLKQAFSTAAALQSAKTQIKLCEACPMHSLHKLCERIEGLYPPRAKLVIQRHLSSLTDNEQADIFERVQKMKPVSDQEENELVILHLRQLCEAKQKTHVHIGEGPSTISNSTIPENATSSGRFKLDILKNKAKRSLTSSLENIFSRGANRMRGRLGSVDSFERSNSLASEKDYSPGDSPPGTPPASPPSSAWQTFPEEDSDSPQFRRRAHTFSHPPSSTKRKLNLQDGRAQGVRSPLLRQSSSEQCSNLSSVRRMYKESNSSSSLPSLHTSFSAPSFTAPSFLKSFYQNSGRLSPQYENEIRQDTASESSDGEGRKRTSSTCSNESLSVGGTSVTPRRISWRQRIFLRVASPMNKSPSAMQQQDGLDRNELLPLSPLSPTMEEEPLVVFLSGEDDPEKIEERKKSKELRSLWRKAIHQQILLLRMEKENQKLEASRDELQSRKVKLDYEEVGACQKEVLITWDKKLLNCRAKIRCDMEDIHTLLKEGVPKSRRGEIWQFLALQYRLRHRLPNKQQPPDISYKELLKQLTAQQHAILVDLGRTFPTHPYFSVQLGPGQLSLFNLLKAYSLLDKEVGYCQGISFVAGVLLLHMSEEQAFEMLKFLMYDLGFRKQYRPDMMSLQIQMYQLSRLLHDYHRDLYNHLEENEISPSLYAAPWFLTLFASQFSLGFVARVFDIIFLQGTEVIFKVALSLLSSQETLIMECESFENIVEFLKNTLPDMNTSEMEKIITQVFEMDISKQLHAYEVEYHVLQDELQESSYSCEDSETLEKLERANSQLKRQNMDLLEKLQVAHTKIQALESNLENLLTRETKMKSLIRTLEQEKMAYQKTVEQLRKLLPADALVNCDLLLRDLNCNPNNKAKIGNKPXLKRHGLSRKCSLEYYREEEPACRWPKAGP

SEQ ID NO: 1277 - protein, 384 aa, Homo Sapiens
  misc_feature (347)..(347): Xaa can be any naturally occurring amino acid
MESVSCSAAAVRTGDMESQRDLSLVPERLQRREQERQLEVERRKQKRQNQEVEKENSHFFVATFARERAAVEELLERAESVERLEEAASRLQGLQKLINDSVFFLAAYDLRQGQEALARLQAALAERRRGLQPKKRFAFKTRGKDAASSTKVDAAPGIPPAVESIQDSPLPKKAEGDLGPSWVCGFSNLESQVLEKRASELHQRDVLLTELSNCTVRLYGNPNTLRLTKAHSCKLLCGPVSTSVFLEDCSDCVLAVACQQLRIHSTKDTRIFLQVTSRAIVEDCSGIQFAPYTWSYPEIDKDFESSGLDRSKNNWNDVDDFNWLARDMASPNWSILPEEERNIQWDXAVVTLFFTPTKYFPRWTFPLIGSRSLLIVTLCMFSAF

SEQ ID NO: 1278 - protein, 566 aa, Homo Sapiens
  misc_feature (535)..(535): Xaa can be any naturally occurring amino acid
MMEALGFLKLEVNGPMVTVALSVALLALLKWYSTSAFSRLEKLGLRHPKPSPFIGNLTFFRQGFWESQMELRKLYGPLCGYYLGRRMFIVISEPDMIKQVLVENFSNFTNRMASGLEFKSVADSVLFLRDKRWEEVRGALMSAFSPEKLNEMVPLISQACDLLLAHLKRYAESGDAFDIQRCYCNYTTDVVASVPFGTPVDSWQAPEDPFVKHCKRFFEFCIPRPILVLLLSFPSIMVPLARILPNKNRDELNGFFNKLIRNVIALRDQQAAEERRRDFLQMVLDARHSASPMGVQDFDIVRDVFSSTGCKPNPSRQHQPSPMARPLTVDEIVGQAFIFLIAGYEIITNTLSFATYLLATNPDCQEKLLREVDVFKEKHMAPEFCSLEEGLPYLDMVIAETLRMYPPAFRFTREAAQDCEVLGQRIPAGAVLEMAVGALHHDPEHWPSPETFNPERFTAEARQQHRPFTYLPFGAGPRSCLGVRLGLLEVKLTLLHVLHKFRFQACPETQVPLQLESKSALGPKNGVYIKIVSRXHRRLPGGGRAPPNSKKTLSVDVQNFGKMSLK

SEQ ID NO: 1279 - protein, 748 aa, Homo Sapiens
  misc_feature (655)..(655): Xaa can be any naturally occurring amino acid
MNQPQRMAPVGTDKELSDLLDFSMMFPLPVTNGKGRPASLAGAQFGGSGLEDRPSSGSWGSGDQSSSSFDPSRTFSEGTHFTESHSSLSSSTFLGPGLGGKSGERGAYASFGRDAGVGGLTQAGFLSGELALNSPGPLSPSGMKGTSQYYPSYSGSSRRRAADGSLDTQPKKVRKVPPGLPSSVYPPSSGEDYGRDATAYPSAKTPSSTYPAPFYVADGSLHPSAELWSPPGQAGFGPMLGGGSSPLPLPPGSGPVGSSGSSSTFGGLHQHERMGYQLHGAEVNGGLPSASSFSSAPGATYGGVSSHTPPVSGADSLLGSRGTTAGSSGDALGKALASIYSPDHSSNNFSSSPSTPVGSPQGLAGTSQWPRAGAPGALSPSYDGGLHGLQSKIEDHLDEAIHVLRSHAVGTAGDMHTLLPGHGALASGFTGPMSLGGRHAGLVGGSHPEDGLAGSTSLMHNHAALPSQPGTLPDLSRPPDSYSGLGRAGATAAASEIKREEKEDEENTSAADHSEEEKKELKAPRARTSPDEDEDDLLPPEQKAEREKERRVANNARERLRVRDINEAFKELGRMCQLHLNSEKPQTKLLILHQAVSVILNLEQQVRERNLNPKAACLKRREEEKVSGVVGDPQMVLSAPHPGLSEAHNPAGHMXKVCLRGTSHPLSALCSGPRSRTRDPGLHPHPHLTHLLSASSQHQPDKVRSDGGGQGDTGSRSSLGPWPTTHWPRSPCPRISATVSLCDLSHGS

SEQ ID NO: 1280 - protein, 495 aa, Homo Sapiens
  misc_feature (436)..(436): Xaa can be any naturally occurring amino acid
MASNSWNASSSPGEAREDGPEGLDKGLDNDAEGVWSPDIEQSFQEALAIYPPCGRRKIILSDEGKMYGRNELIARYIKLRTGKTRTRKQVSSHIQVLARKKVREYQVGIKAMNLDQVSKDKALQSMASMSSAQIVSASVLQNKFSPPSPLPQAVFSTSSRFWSSPPLLGQQPGPSQDIKPFAQPAYPIQPPLPPTLSSYEPLAPLPSAAASVPVWQDRTIASSRLRLLEYSAFMEVQRDPDTYSKHLFVHIGQTNPAFSDPPLEAVDVRQIYDKFPEKKGGLKELYEKGPPNAFFLVKFWADLNSTIQEGPGAFYGVSSQYSSADSMTISVSTKVCSFGKQVVEKVETEYARLENGRFVYRIHRSPMCEYMINFIHKLKHLPEKYMMNSVLENFTILQVVTSRDSQETLLVIAFVFEVSTSEHGAQHHVYKLVKDXGALCASLRMQGEHLLSTPAWHPWGGPGLRIHLPARPQAQDPGGLPTYPSTHTPCHCSAL

SEQ ID NO: 1281 - protein, 325 aa, Homo Sapiens
  misc_feature (304)..(304): Xaa can be any naturally occurring amino acid
MSDAGGGKKPPVDPQAGPGPGPGRAAGERGLSGSFPLVLKKLMENPPREARLDKEKGKEKLEEDEAAAASTMAVSASLMPPIWDKTIPYDGESFHLEYMDLDEFLLENGIPASPTHLAHNLLLPVAELEGKESASSSTASPPSSSTAIFQPSETVSSTESSLEKERETPSPIDPNCVEVDVNFNPDPADLVLSSVPGGELFNPRKHKFAEEDLKPQPMIKKAKKVFVPDEQKDEKYWTRRKKNNVAAKRSRDARRLKENQITIRAAFLEKENTALRTEVAELRKEVGKCKTIVSKYETKYGPLXPVPPARAGYCLHLRPLPGGSL

SEQ ID NO: 1282 - protein, 423 aa, Homo Sapiens
  misc_feature (420)..(420): Xaa can be any naturally occurring amino acid
MAEDVSSAAPSPRRCADGRDADPTEEQMAETERNDEEQFECQELLECQVQVGAPEEEEEEEEDAGLVAEAEAVAAGWMLDFLCLSLCRAFRDGRSEDFRRTRNSAEAIIHGLSSLTACQLRTIYICQFLTRIAAGKTLDAQFENDERITPLESALMIWGSIEKEHDKLHEEIQNLIKIQAIAVCMENGNFKEAEEVFERIFGDPNSHMPFKSKLLMIISQKDTFHSFFQHFSYNHMMEKIKSYVNYVLSEKSSTFLMKAAAKVVESKRTRTITSQDKPSGNDVEMETEANLDTRKRSHKNLFLSKLQHGTQQQDLNKKERRVGTPQSTKKKKESRRATESRIPVSKSQPVTPEKHRARKRQAWLWEEDKNLRSGVRKYGEGNWSKILLHYKFNNRTSVMLKDRWRTMKKLKLISSDSEDXLCL

SEQ ID NO: 1283 - protein, 443 aa, Homo Sapiens
  misc_feature (440)..(440): Xaa can be any naturally occurring amino acid
MAEDVSSAAPSPRRCADGRDADPTEEQMAETERNDEEQFECQELLECQVQVGAPEEEEEEEEDAGLVAEAEAVAAGWMLDFLCLSLCRAFRDGRSEDFRRTRNSAEAIIHGLSSLTACQLRTIYICQFLTRIAAGKTLDAQFENDERITPLESALMIWGSIEKEHDKLHEEIQNLIKIQAIAVCMENGNFKEAEEVFERIFGDPNSHMPFKSKLLMIISQKDTFHSFFQHFSYNHMMEKIKSYVNYVLSEKSSTFLMKAAAKVVESKRTRTITSQDKPSGNDVEMETEANLDTRKSVSDKQSAVTESSEGTVSLLRSHKNLFLSKLQHGTQQQDLNKKERRVGTPQSTKKKKESRRATESRIPVSKSQPVTPEKHRARKRQAWLWEEDKNLRSGVRKYGEGNWSKILLHYKFNNRTSVMLKDRWRTMKKLKLISSDSEDXLCL

SEQ ID NO: 1284 - protein, 508 aa, Homo Sapiens
  misc_feature (477)..(477): Xaa can be any naturally occurring amino acid
MASRIGLRMQLMREQAQQEEQRERMQQQAVMHYMQQQQQQQQQQLGGPPTPAINTPVHFQSPPPVPGEVLKVQSYLENPTSYHLQQSQHQKVREYLSETYGNKFAAHISPAQGSPKPPPAASPGVRAGHVLSSSAGNSAPNSPMAMLHIGSNPERELDDVIDNIMRLDDVLGYINPEMQMPNTLPLSSSHLNVYSSDPQVTASLVGVTSSSCPADLTQKRELTDAESRALAKERQKKDNHNLIERRRRFNINDRIKELGMLIPKANDLDVRWNKGTILKASVDYIRRMQKDLQKSRELENHSRRLEMTNKQLWLRIQELEMQARVHGLPTTSPSGMNMAELAQQVVKQELPSEEGPGEALMLGAEVPDPEPLPALPPQAPLPLPTQPPSPFHHLDFSHSLSFGGREDEGPPGYPEPLAPGHGSPFPSLSKKDLDLMLLDDSLLPLASDPLLSTMSPEASKASSRRSSFSMEEGDVLXPWLPLCQGTGAGLGAGRARGTSLPPFRLHCV

SEQ ID NO: 1285 - protein, 266 aa, Homo Sapiens
  misc_feature (252)..(252): Xaa can be any naturally occurring amino acid
MIYTMKKVHALWASVCLLLNLAPAPLNADSEEDEEHTIITDTELPPLKLMHSFCAFKADDGPCKAIMKRFFFNIFTRQCEEFIYGGCEGNQNRFESLEECKKMCTRDNANRIIKTTLQQEKPDFCFLEEDPGICRGYITRYFYNNQTKQCERFKYGGCLGNMNNFETLEECKNICEDGPNGFQVDNYGTQLNAVNNSLTPQSTKVPSLFVTKEGTNDGWKNAAHIYQVFLNAFCIHASMFFLGLDSISCLCXYLCFWHFLNIYMYT

SEQ ID NO: 1286 - protein, 331 aa, Homo Sapiens
  misc_feature (305)..(305): Xaa can be any naturally occurring amino acid
MIYTMKKVHALWASVCLLLNLAPAPLNADSEEDEEHTIITDTELPPLKLMHSFCAFKADDGPCKAIMKRFFFNIFTRQCEEFIYGGCEGNQNRFESLEECKKMCTRDNANRIIKTTLQQEKPDFCFLEEDPGICRGYITRYFYNNQTKQCERFKYGGCLGNMNNFETLEECKNICEDGPNGFQVDNYGTQLNAVNNSLTPQSTKVPSLFEFHGPSWCLTPADRGLCRANENRFYYNSVIGKCRPFKYSGCGGNENNFTSKQECLRACKKGFIQRISKGGLIKTKRKRKKQRVKIAYEEIFVKNMXICYSNVTLILLNILYEMFHYDFLFFF

SEQ ID NO: 1287 - protein, 753 aa, Homo Sapiens
  misc_feature (684)..(684): Xaa can be any naturally occurring amino acid
MALFVRLLALALALALGPAATLAGPAKSPYQLVLQHSRLRGRQHGPNVCAVQKVIGTNRKYFTNCKQWYQRKICGKSTVISYECCPGYEKVPGEKGCPAALPLSNLYETLGVVGSTTTQLYTDRTEKLRPEMEGPGSFTIFAPSNEAWASLPAEVLDSLVSNVNIELLNALRYHMVGRRVLTDELKHGMTLTSMYQNSNIQIHHYPNGIVTVNCARLLKADHHATNGVVHLIDKVISTITNNIQQIIEIEDTFETLRAAVAASGLNTMLEGNGQYTLLAPTNEAFEKIPSETLNRILGDPEALRDLLNNHILKSAMCAEAIVAGLSVETLEGTTLEVGCSGDMLTINGKAIISNKDILATNGVIHYIDELLIPDSAKTLFELAAESDVSTAIDLFRQAGLGNHLSGSERLTLLAPLNSVFKDGTPPIDAHTRNLLRNHIIKDQLASKYLYHGQTLETLGGKKLRVFVYRNSLCIENSCIAAHDKRGRYGTLFTMDRVLTPPMGTVMDVLKGDNRFSMLVAAIQSAGLTETLNREGVYTVFAPTNEAFRALPPRERSRLLGDAKELANILKYHIGDEILVSGGIGALVRLKSLQGDKLEVSLKNNVVSVNKEPVAEPDIMATNGVVHVITNVLQPPANRPQERGDELADSALEIFKQASAFSRASQRSVRLAPVYQKLLERMKHXLEALQEECTTAALRQFLSDFHRDCLNVFKTKYHTLMYMGRTIMRCEPCACGGGGREMYFLNHVPPKHGC

SEQ ID NO: 1288 - protein, 715 aa, Homo Sapiens
  misc_feature (694)..(694): Xaa can be any naturally occurring amino acid
MAALGVQSINWQTAFNRQAHHTDKFSSQELILRRGQNFQVLMIMNKGLGSNERLEFIVSTGPYPSESAMTKAVFPLSNGSSGGWSAVLQASNGNTLTISISSPASAPIGRYTMALQIFSQGGISSVKLGTFILLFNPWLNVDSVFMGNHAEREEYVQEDAGIIFVGSTNRIGMIGWNFGQFEEDILSICLSILDRSLNFRRDAATDVASRNDPKYVGRVLSAMINSNDDNGVLAGNWSGTYTGGRDPRSWNGSVEILKNWKKSGFSPVRYGQCWVFAGTLNTALRSLGIPSRVITNFNSAHDTDRNLSVDVYYDPMGNPLDKGSDSVWNFHVWNEGWFVRSDLGPSYGGWQVLDATPQERSQGVFQCGPASVIGVREGDVQLNFDMPFIFAEVNADRITWLYDNTTGKQWKNSVNSHTIGRYISTKAVGSNARMDVTDKYKYPEGSDQERQVFQKALGKLKPNTPFAATSSMGLETEEQEPSIIGKLKVAGMLAVGKEVNLVLLLKNLSRDTKTVTVNMTAWTIIYNGTLVHEVWKDSATMSLDPEEEAEHPIKISYAQYEKYLKSDNMIRITAVCKVPDESEVVVERDIILDNPTLTLEVLNEARVRKPVNVQMLFSNPLDEPVRDCVLMVEGSGLLLGNLKIDVPTLGPKERSRVRFDILPSRSGTKQLLADFSCNKFPAIKAMLSIDVAEXRALVASRTNLDNTEQGELTME

SEQ ID NO: 1289 - protein, 630 aa, Homo Sapiens
  misc_feature (576)..(576): Xaa can be any naturally occurring amino acid
MLGVLVLGALALAGLGFPAPAEPQPGGSQCVEHDCFALYPGPATFLNASQICDGLRGHLMTVRSSVAADVISLLLNGDGGVGRRRLWIGLQLPPGCGDPKRLGPLRGFQWVTGDNNTSYSRWARLDLNGAPLCGPLCVAVSAAEATVPSEPIWEEQQCEVKADGFLCEFHFPATCRPLAVEPGAAAAAVSITYGTPFAARGADFQALPVGSSAAVAPLGLQLMCTAPPGAVQGHWAREAPGAWDCSVENGGCEHACNAIPGAPRCQCPAGAALQADGRSCTASATQSCNDLCEHFCVPNPDQPGSYSCMCETGYRLAADQHRCEDVDDCILEPSPCPQRCVNTQGGFECHCYPNYDLVDGECVEPVDPCFRANCEYQCQPLNQTSYLCVCAEGFAPIPHEPHRCQMFCNQTACPADCDPNTQASCECPEGYILDDGFICTDIDECENGGFCSGVCHNLPGTFECICGPDSALARHIGTDCDSGKVDGGDSGSGEPPPSPTPGSTLTPPAVGLVHSGLLIGISIASLCLVVALLALLCHLRKKQGAARAKMEYKCAAPSKEVVLQHVRTERTPQRLXAASVQEPGSVQEPVPPHPQLCYQSTLAGITAGEDPPRTPQAVFFYSMANWRGGD

SEQ ID NO: 1290 - protein, 968 aa, Homo Sapiens
  misc_feature (957)..(957): Xaa can be any naturally occurring amino acid
METQELRGALALLLLCFFTSASQDLQVIDLLTVGESRQMVAVAEKIRTALLTAGDIYLLSTFRLPPKQGGVLFGLYSRQDNTRWLEASVVGKINKVLVRYQREDGKVHAVNLQQAGLADGRTHTVLLRLRGPSRPSPALHLYVDCKLGDQHAGLPALAPIPPAEVDGLEIRTGQKAYLRMQGFVESMKIILGGSMARVGALSECPFQGDESIHSAVTNALHSILGEQTKALVTQLTLFNQILVELRDDIRDQVKEMSLIRNTIMECQVCGFHEQRSHCSPNPCFRGVDCMEVYEYPGYRCGPCPPGLQGNGTHCSDINECAHADPCFPGSSCINTMPGFHCEACPRGYKGTQVSGVGIDYARASKQVCNDIDECNDGNNGGCDPNSICTNTVGSFKCGPCRLGFLGNQSQGCLPARTCHSPAHSPCHIHAHCLFERNGAVSCQCNVGWAGNGNVCGTDTDIDGYPDQALPCMDNNKHCKQDNCLLTPNSGQEDADNDGVGDQCDDDADGDGIKNVEDNCRLFPNKDQQNSDTDSFGDACDNCPNVPNNDQKDTDGNGEGDACDNDVDGDGIPNGLDNCPKVPNPLQTDRDEDGVGDACDSCPEMSNPTQTDADSDLVGDVCDTNEDSDGDGHQDTKDNCPQLPNSSQLDSDNDGLGDECDGDDDNDGIPDYVPPGPDNCRLVPNPNQKDSDGNGVGDVCEDDFDNDAVVDPLDVCPESAEVTLTDFRAYQTVVLDPEGDAQIDPNWVVLNQGMEIVQTMNSDPGLAVGYTAFNGVDFEGTFHVNTVTDDDYAGFLFSYQDSGRFYVVMWKQTEQTYWQATPFRAVAQPGLQLKAVTSVSGPGEHLRNALWHTGHTPDQVRLLWTDPRNVGWRDKTSYRWQLLHRPQVGYIRVKLYEGPQLVADSGVIIDTSMRGGRLGVFCFSQENIIWSNLQYRCNDTVPEDFEPFRRQLLQGRVXGGGHQIQNSEF

SEQ ID NO: 1291 - protein, 1602 aa, Homo Sapiens
  misc_feature (1592)..(1592): Xaa can be any naturally occurring amino acid
MGNAESQHVEHEFYGEKHASLGRKHTSRSLRLSHKTRRTRHASSGKVIHRNSEVSTRSSSTPSIPQSLAENGLEPFSQDGTLEDFGSPIWVDRVDMGLRPVSYTDSSVTPSVDSSIVLTAASVQSMPDTEESRLYGDDATYLAEGGRRQHSYTSNGPTFMETASFKKKRSKSADIWREDSLEFSLSDLSQEHLTSNEEILGSAEEKDCEEARGMETRASPRQLSTCQRANSLGDLYAQKNSGVTANGGPGSKFAGYCRNLVSDIPNLANHKMPPAAAEETPPYSNYNTLPCRKSHCLSEGATNPQISHSNSMQGRRAKTTQDVNAGEGSEFADSGIEGATTDTDLLSRRSNATNSSYSPTTGRAFVGSDSGSSSTGDAARQGVYENFRRELEMSTTNSESLEEAGSAHSDEQSSGTLSSPGQSDILLTAAQGTVRKAGALAVKNFLVHKKNKKVESATRRKWKHYWVSLKGCTLFFYESDGRSGIDHNSIPKHAVWVENSIVQAVPEHPKKDFVFCLSNSLGDAFLFQTTSQTELENWITAIHSACATAVARHHHKEDTLRLLKSEIKKLEQKIDMDEKMKKMGEMQLSSVTDSKKKKTILDQIFVWEQNLEQFQMDLFRFRCYLASLQGGELPNPKRLLAFASRPTKVAMGRLGIFSVSSFHALVAARTGETGVRRRTQAMSRSASKRRSRFSSLWGLDTTSKKKQGRPSINQVFGEGTEAVKKSLEGIFDDIVPDGKREKEVVLPNVHQHNPDCDIWVHEYFTPSWFCLPNNQPALTVVRPGDTARDTLELICKTHQLDHSAHYLRLKFLIENKMQLYVPQPEEDIYELLYKEIEICPKVTQSIHIEKSDTAADTYGFSLSSVEEDGIRRLYVNSVKETGLASKKGLKAGDEILEINNRAADALNSSMLKDFLSQPSLGLLVRTYPELEEGVELLESPPHRVDGPADLGESPLAFLTSNPGHSLCSEQGSSAETAPEETEGPDLESSDETDHSSKSTEQVAAFCRSLHEMNPSDQSPSPQDSTGPQLATMRQLSDADKLRKVICELLETERTYVKDLNCLMERYLKPLQKETFLTQDELDVLFGNLTEMVEFQVEFLKTLEDGVRLVPDLEKLEKVDQFKKVLFSLGGSFLYYADRFKLYSAFCASHTKVPKVLVKAKTDTAFKAFLDAQNPKQQHSSTLESYLIKPIQRILKYPLLLRELFALTDAESEEHYHLDVAIKTMNKVASHINEMQKIHEEFGAVFDQLIAEQTGEKKEVADLSMGDLLLHTTVIWLNPPASLGKWKKEPELAAFVFKTAVVLVYKDGSKQKKKLVGSHRLSIYEDWDPFRFRHMIPTEALQVRALASADAEANAVCEIVHVKSESEGRPERVFHLCCSSPESRKDFLKAVHSILRDKHRRQLLKTESLPSSQQYVPFGGKRLCALKGARPAMSRAVSAPSKSLGRRRRRLARNRFTIDSDAVSASSPEKESQQPPGGGDTDRWVEEQFDLAQYEEQDDIKETDILSDDDEFCESVKGASVDRDLQERLQATSISQRERGRKTLDSHASRMAQLKKQAALSGINGGLESASEEVIWVRREDFAPSRKLNTEIXLRHLPRRECV

SEQ ID NO: 1292 - protein, 1762 aa, Homo Sapiens
  misc_feature (1749)..(1749): Xaa can be any naturally occurring amino acid
MSARAAAAKSTAMEETAIWEQHTVTLHRAPGFGFGIAISGGRDNPHFQSGETSIVISDVLKGGPAEGQLQENDRVAMVNGVSMDNVEHAFAVQQLRKSGKNAKITIRRKKKVQIPVSRPDPEPVSDNEEDSYDEEIHDPRSGRSGVVNRRSEKIWPRDRSASRERSLSPRSDRRSVASSQPAKPTKVTLVKSRKNEEYGLRLASHIFVKEISQDSLAARDGNIQEGDVVLKINGTVTENMSLTDAKTLIERSKGKLKMVVQRDERATLLNVPDLSDSIHSANASERDDISEIQSLASDHSGRSHDRPPRRSRSRSPDQRSEPSDHSRHSPQQPSNGSLRSRDEERISKPGAVSTPVKHADDHTPKTVEEVTVERNEKQTPSLPEPKPVYAQVGQPDVDLPVSPSDGVLPNSTHEDGILRPSMKLVKFRKGDSVGLRLAGGNDVGIFVAGVLEDSPAAKEGLEEGDQILRVNNVDFTNIIREEAVLFLLDLPKGEEVTILAQKKKDVYRRIVESDVGDSFYIRTHFEYEKESPYGLSFNKGEVFRVVDTLYNGKLGSWLAIRIGKNHKEVERGIIPNKNRAEQLASVQYTLPKTAGGDRADFWRFRGLRSSKRNLRKSREDLSAQPVQTKFPAYERVVLREAGFLRPVTIFGPIADVAREKLAREEPDIYQIAKSEPRDAGTDQRSSGIIRLHTIKQIIDQDKHALLDVTPNAVDRLNYAQWYPIVVFLNPDSKQGVKTMRMRLCPESRKSARKLYERSHKLRKNNHHLFTTTINLNSMNDGWYGALKEAIQQQQNQLVWVSEGKADGATSDDLDLHDDRLSYLSAPGSEYSMYSTDSRHTSDYEDTDTEGGAYTDQELDETLNDEVGTPPESAITRSSEPVREDSSGMHHENQTYPPYSPQAQPQPIHRIDSPGFKPASQQKAEASSPVPYLSPETNPASSTSAVNHNVNLTNVRLEEPTPAPSTSYSPQADSLRTPSTEAAHIMLRDQEPSLSSHVDPTKVYRKDPYPEEMMRQNHVLKQPAVSHPGHRPDKEPNLTYEPQLPYVEKQASRDLEQPTYRYESSSYTDQFSRNYEHRLRYEDRVPMYEEQWSYYDDKQPYPSRPPFDNQHSQDLDSRQHPEESSERGYFPRFEEPAPLSYDSRPRYEQAPRASALRHEEQPAPGYDTHGRLRPEAQPHPSAGPKPAESKQYFEQYSRSYEQVPPQGFTSRAGHFEPLHGAAAVPPLIPSSQHKPEALPSNTKPLPPPPTQTEEEEDPAMKPQSVLTRVKMFENKRSASLETKKDVNDTGSFKPPEVASKPSGAPIIGPKPTSQNQFSEHDKTLYRIPEPQKPQLKPPEDIVRSNHYDPEEDEEYYRKQLSYFDRRSFENKPPAHIAASHLSEPAKPAHSQNQSNFSSYSSKGKPPEADGVDRSFGEKRYEPIQATPPPPPLPSQYAQPSQPVTSASLHIHSKGAHGEGNSVSLDFQNSLVSKPDPPPSQNKPATFRPPNREDTAQAAFYPQKSFPDKAPVNGTEQTQKTVTPAYNRFTPKPYTSSARPFERKFESPKFNHNLLPSETAHKPDLSSKTPTSPKTLVKSHSLAQPPEFDSGVETFSIHAEKPKYQINNISTVPKAIPVSPSAVEEDEDEDGHTVVATARGIFNSNGGVLSSIETGVSIIIPQGAIPEGVEQEIYFKVCRDNSILPPLDKEKGETLLSPLVMCGPHGLKFLKPVELRLPHCDPKTWQNKCLPGDPNYLVGANCVSVLIDHFXLLKYRNLNNVKLD

SEQ ID NO: 1293 - protein, 395 aa, Homo Sapiens
  misc_feature (375)..(375): Xaa can be any naturally occurring amino acid
MVLWESPRQCSSWTLCEGFCWLLLLPVMLLIVARPVKLAAFPTSLSDCQTPTGWNCSGYDDRENDLFLCDTNTCKFDGECLRIGDTVTCVCQFKCNNDYVPVCGSNGESYQNECYLRQAACKQQSEILVVSEGSCATDAGSGSGDGVHEGSGETSQKETSTCDICQFGAECDEDAEDVWCVCNIDCSQTNFNPLCASDGKSYDNACQIKEASCQKQEKIEVMSLGRCQDNTTTTTKSEDGHYARTDYAENANKLEESAREHHIPCPEHYNGFCMHGKCEHSINMQEPSCRCDAGYTGQHCEKKDYSVLYVVPGPVRFQYVLIAAVIGTIQIAVICVVVLCITRKCPRSNRIHRQKQNTGHYSSDNTTRASTRLIXREHVSQWLDYRELGLHNTVL

SEQ ID NO: 1294 - protein, 283 aa, Homo Sapiens
  misc_feature (278)..(278): Xaa can be any naturally occurring amino acid
MIILIYLFLLLWEDTQGWGFKDGIFHNSIWLERAAGVYHREARSGKYKLTYAEAKAVCEFEGGHLATYKQLEAARKIGFHVCAAGWMAKGRVGYPIVKPGPNCGFGKTGIIDYGIRLNRSERWDAYCYNPHAKECGGVFTDPKQIFKSPGFPNEYEDNQICYWHIRLKYGQRIHLSFLDFDLEDDPGCLADYVEIYDSYDDVHGFVGRYCGDELPDDIISTGNVMTLKFLSDASVTAGGFQIKYVAMDPVSKSSQGKNTSTTSTGNKNFLAGRFSHLXKKKKG

SEQ ID NO: 1295 - protein, 199 aa, Homo Sapiens
  misc_feature (161)..(161): Xaa can be any naturally occurring amino acid
MTDQQAEARSYLSEEMIAEFKAAFDMFDADGGGDISVKELGTVMRMLGQTPTKEELDAIIEEVDEDGSGTIDFEEFLVMMVRQMKEDAKGKSEEELAECFRIFDRNADGYIDPEELAEIFRASGEHVTDEEIESLMKDGDKNNDGRIDFDEFLKMMEGVQXGVDSRLYQDRVSLGCGRLRPAGSPPGRRDPLWVFVWKE

SEQ ID NO: 1296 - protein, 230 aa, Homo Sapiens
  misc_feature (211)..(211): Xaa can be any naturally occurring amino acid
MADGSSDAAREPRPAPAPIRRRSSNYRAYATEPHAKKKSKISASRKLQLKTLLLQIAKQELEREAEERRGEKGRALSTRCQPLELAGLGFAELQDLCRQLHARVDKVDEERYDIEAKVTKNITEIADLTQKIFDLRGKFKRPTLRRVRISADAMMQALLGARAKESLDLRAHLKQVKKEDTEKENREVGDWRKNIDALSGMEGRKKKFESXAFLPTAPALRRALRNKASL

SEQ ID NO: 1297 - protein, 1360 aa, Homo Sapiens
  misc_feature (1300)..(1300): Xaa can be any naturally occurring amino acid
MAAETQTLNFGPEWLRALSSGGSITSPPLSPALPKYKLADYRYGREEMLALFLKDNKIPSDLLDKEFLPILQEEPLPPLALVPFTEEEQRNFSMSVNSAAVLRLTGRGGGGTVVGAPRGRSSSRGRGRGRGECGFYQRSFDEVEGVFGRGGGREMHRSQSWEERGDRRFEKPGRKDVGRPNFEEGGPTSVGRKHEFIRSESENWRIFREEQNGEDEDGGWRLAGSRRDGERWRPHSPDGPRSAGWREHMERRRRFEFDFRDRDDERGYRRVRSGSGSIDDDRDSLPEWCLEDAEEEMGTFDSSGAFLSLKKVQKEPIPEEQEMDFRPVDEGEECSDSEGSHNEEAKEPDKTNKKEGEKTDRVGVEASEETPQTSSSSARPGTPSDHQSQEASQFERKDEPKTEQTEKAEEETRMENSLPAKVPSRGDEMVADVQQPLSQIPSDTASPLLILPPPVPNPSPTLRPVETPVVGAPGMGSVSTEPDDEEGLKHLEQQAEKMVAYLQDSALDDERLASKLQEHRAKGVSIPLMHEAMQKWYYKDPQGEIQGPFNNQEMAEWFQAGYFTMSLLVKRACDESFQPLGDIMKMWGRVPFSPGPAPPPHMGELDQERLTRQQELTALYQMQHLQYQQFLIQQQYAQVLAQQQKAALSSQQQQQLALLLQQFQTLKMRISDQNIIPSVTRSVSVPDTGSIWELQPTASQPTVWEGGSVWDLPLDTTTPGPALEQLQQLEKAKAAKLEQERREAEMRAKREEEERKRQEELRRQQEEILRRQQEEERKRREEEELARRKQEEALRRQREQEIALRRQREEEERQQQEEALRRLEERRREEEERRKQEELLRKQEEEAAKWAREEEEAQRRLEENRLRMEEEAARLRHEEEERKRKELEVQRQKELMRQRQQQQEALRRLQQQQQQQQLAQMKLPSSSTWGQQSNTTACQSQATLSLAEIQKLEEERERQLREEQRRQQRELMKALQQQQQQQQQKLSGWGNVSKPSGTTKSLLEIQQEEARQMQKQQQQQQQHQQPNRARNNTHSNLHTSIGNSVWGSINTGPPNQWASDLVSSIWSNADTKNSNMGFWDDAVKEVGPRNSTNKNKNNASLSKSVGVSNRQNKKVEEEEKLLKLFQGVNKAQDGFTQWCEQMLHALNTANNLDVPTFVSFLKEVESPYEVHDYIRAYLGDTSEAKEFAKQFLERRAKQKANQQRQQQQLPQQQQQQPPQQPPQQPQQQDSVWGMNHSTLHSVFQTNQSNNQQSNFEAVQSGKKKKKQKMVRADPSLLGFSVNASSERLNMGEIETLDDYXAPASGLAIPLLSADYGVSTFGHNTYSPFTLYHSATNHRTDHLRLFLLALCVQDSLIHFCW

SEQ ID NO: 1298 - protein, 256 aa, Homo Sapiens
  misc_feature (248)..(248): Xaa can be any naturally occurring amino acid
MAGITTIEAVKRKIQVLQQQADDAEERAERLQREVEGERRAREQAEAEVASLNRRIQLVEEELDRAQERLATALQKLEEAEKAADESERGMKVIENRALKDEEKMELQEIQLKEAKHIAEEADRKYEEVARKLVIIEGDLERTEERAELAESRCREMDEQIRLMDQNLKCLSAAEEKYSQKEDKYEEEIKILTDKLKEAETRAEFAERSVAKLEKTIDDLEERLYSQLERNRLLSNELKLTLHDLCDXWAGLNDAH

SEQ ID NO: 1299 - protein, 342 aa, Homo Sapiens
  misc_feature (286)..(286): Xaa can be any naturally occurring amino acid
MMEAIKKKMQMLKLDKENALDRAEQAEAEQKQAEERSKQLEDELAAMQKKLKGTEDELDKYSEALKDAQEKLELAEKKAADAEAEVASLNRRIQLVEEELDRAQERLATALQKLEEAEKAADESERGMKVIENRALKDEEKMELQEIQLKEAKHIAEEADRKYEEVARKLVIIEGDLERTEERAELAESKCSELEEELKNVTNNLKSLEAQAEKYSQKEDKYEEEIKILTDKLKEAETRAEFAERSVAKLEKTIDDLEDELYAQKLKYKAISEELDHALNDMTSIXLSPFLLCSGSAPFTPRGTQGPTLALDSIWVSLAGPQGIRMGEQKATYVFSSTPTPN

SEQ ID NO: 1300 - protein, 261 aa, Homo Sapiens
  misc_feature (249)..(249): Xaa can be any naturally occurring amino acid
MAGITTIEAVKRKIQVLQQQADDAEERAERLQREVEGERRAREQAEAEVASLNRRIQLVEEELDRAQERLATALQKLEEAEKAADESERGMKVIENRALKDEEKMELQEIQLKEAKHIAEEADRKYEEVARKLVIIEGDLERTEERAELAESRCREMDEQIRLMDQNLKCLSAAEEKYSQKEDKYEEEIKILTDKLKEAETRAEFAERSVAKLEKTIDDLEDKLKCTKEEHLCTQRMLDQTLLDLNEMXNAPVPPCCCSSL

SEQ ID NO: 1301 - protein, 343 aa, Homo Sapiens
  misc_feature (313)..(313): Xaa can be any naturally occurring amino acid
MAAGQNGHEEWVGSAYLFVESSLDKVVLSDAYAHPQQKVAVYRALQAALAESGGSPDVLQMLKIHRSDPQLIVQLRFCGRQPCGRFLRAYREGALRAALQRSLAAALAQHSVPLQLELRAGAERLDALLADEERCLSCILAQQPDRLRDEELAELEDALRNLKCGSGARGGDGEVASAPLQPPVPSLSEVKPPPPPPPAQTFLFQGQPVVNRPLSLKDQQTFARSVGLKWRKVGRSLQRGCRALRDPALDSLAYEYEREGLYEQAFQLLRRFVQAEGRRATLQRLVEALEENELTSLAEDLLGLTDPNGGLAXTRGAASFWRTWMALGFLLRLLLNPCPSTGP

SEQ ID NO: 1302 - protein, 745 aa, Homo Sapiens
  misc_feature (730)..(730): Xaa can be any naturally occurring amino acid
MTEITAEGNASTTTTVIDSKNGSVPKSPGKVLKRTVTEDIVTTFSSPAAWLLVIALIITWSAVAIVMFDLVDYKNFSASSIAKIGSDPLKLVRDAMEETTDWIYGFFSLLSDIISSEDEEDDDGDEDTDKGEIDEPPLRKKEIHKDKTEKQEKPERKIQTKVTHKEKEKGKEKVREKEKPEKKATHKEKIEKKEKPETKTLAKEQKKAKTAEKSEEKTKKEVKGGKQEKVKQTAAKVKEVQKTPSKPKEKEDKEKAAVSKHEQKDQYAFCRYMIDIFVHGDLKPGQSPAIPPPLPTEQASRPTPASPALEEKEGEKKKAEKKVTSETKKKEKEDIKKKSEKETAIDVEKKEPGKASETKQGTVKIAAQAAAKKDEKKEDSKKTKKPAEVEQPKGKKQEKKEKHVEPAKSPKKEHSVPSDKQVKAKTERAKEEIGAVSIKKAVPGKKEEKTTKTVEQEIRKEKSGKTSSILKDKEPIKGKEEKVPASLKEKEPETKKDEKMSKAGKEVKPKPPQLQGKKEEKPEPQIKKEAKPAISEKVQIHKQDIVKPEKTVSHGKPEEKVLKQVKAVTIEKTAKPKPTKKAEHREREPPSIKTDKPKPTPKGTSEVTESGKKKTEISEKESKEKADMKHLREEKVSTRKESLQLHNVTKAEKPARVSKDVEDVPASKKAKEGTEDVSPTKQKSPISFFQCVYLDGYNGYGFQFPFTPADRPGESSGQANSPGQKQQGQXTHMYDPYKCFKILKM

SEQ ID NO: 1303 - protein, 271 aa, Homo Sapiens
  misc_feature (243)..(243): Xaa can be any naturally occurring amino acid
MPGPWLLLALALTLNLTGVPGGRAQPEAAQQEAVTAAEHPGLDDFLRQVERLLFLRENIQRLQGDQGEHSASQIFQSDWLSKRQHPGKREEEEEEGVEEEEEEEGGAVGPHKRQHPGRREDEASWSVDVTQHKRQHPGRRSPWLAYAVPKRQHPGRRLADPKAQRSWEEEEEEEEREEDLMPEKRQHPGKRALGGPCGPQGAYGQAGLLLGLLDDLSRSQGAEEKRQHPGRRAAWVREPLEEXTQFSLKSSLWSKDVLSPVCPTIHDLCIL

SEQ ID NO: 1304 - protein, 424 aa, Homo Sapiens
  misc_feature (408)..(408): Xaa can be any naturally occurring amino acid
MELLEEDLTCPICCSLFDDPRVLPCSHNFCKKCLEGILEGSVRNSLWRPAPFKCPTCRKETSATGINSLQVNYSLKGIVEKYNKIKISPKMPVCKGHLGQPLNIFCLTDMQLICGICATRGEHTKHVFCSIEDAYAQERDAFESLFQSFETWRRGDALSRLDTLETSKRKSLQLLTKDSDKVKEFFEKLQHTLDQKKNEILSDFETMKLAVMQAYDPEINKLNTILQEQRMAFNIAEAFKDVSEPIVFLQQMQEFREKIKVIKETPLPPSNLPASPLMKNFDTSQWEDIKLVDVDKLSLPQDTGTFISKIPWSFYKLFLLILLLGLVIVFGPTMFLEWSLFDDLATWKGCLSNFSSYLTKTADFIEQSVFYWEQVTDGFFIFNERFKNFTLVVLNNVAEFVCKYKLLXNLFQVCSFLLLEIVRE

SEQ ID NO: 1305 - protein, 604 aa, Homo Sapiens
  misc_feature (589)..(589): Xaa can be any naturally occurring amino acid
MEAADASRSNGSSPEARDARSPSGPSGSLENGTKADGKDAKTTNGHGGEAAEGKSLGSALKPGEGRSALFAGNEWRRPIIQFVESGDDKNSNYFSMDSMEGKRSPYAGLQLGAAKKPPVTFAEKGELRKSIFSESRKPTVSIMEPGETRRNSYPRADTGLFSRSKSGSEEVLCDSCIGNKQKAVKSCLVCQASFCELHLKPHLEGAAFRDHQLLEPIRDFEARKCPVHGKTMELFCQTDQTCICYLCMFQEHKNHSTVTVEEAKAEKETELSLQKEQLQLKIIEIEDEAEKWQKEKDRIKSFTTNEKAILEQNFRDLVRDLEKQKEEVRAALEQREQDAVDQVKVIMDALDERAKVLHEDKQTREQLHSISDSVLFLQEFGALMSNYSLPPPLPTYHVLLEGEGLGQSLGNFKDDLLNVCMRHVEKMCKADLSRNFIERNHMENGGDHRYVNNYTNSFGGEWSAPDTMKRYSMYLTPKGGVRTSYQPSSPGRFTKETTQKNFNNLYGTKGNYTSRVWEYSSSIQNSDNDLPVVQGSSSFSLKGYPSLMRSQSPKAQPQTWKSGKQTMLSHYRPFYVNKGNGIGSNEAPXAPGGRNEAPHPCSSS

SEQ ID NO: 1306 - protein, 1178 aa, Homo Sapiens
  misc_feature (1128)..(1128): Xaa can be any naturally occurring amino acid
MAENKGGGEAESGGGGSGSAPVTAGAAGPAAQEAEPPLTAVLVEEEEEEGGRAGAEGGAAGPDDGGVAAASSGSAQAASSPAASVGTGVAGGAVSTPAPAPASAPAPGPSAGPPPGPPASLLDTCAVCQQSLQSRREAEPKLLPCLHSFCLRCLPEPERQLSVPIPGGSNGDIQQVGVIRCPVCRQECRQIDLVDNYFVKDTSEAPSSSDEKSEQVCTSCEDNASAVGFCVECGEWLCKTCIEAHQRVKFTKDHLIRKKEDVSESVGASGQRPVFCPVHKQEQLKLFCETCDRLTCRDCQLLEHKEHRYQFLEEAFQNQKGAIENLLAKLLEKKNYVHFAATQVQNRIKEVNETNKRVEQEIKVAIFTLINEINKKGKSLLQQLENVTKERQMKLLQQQNDITGLSRQVKHVMNFTNWAIASGSSTALLYSKRLITFQLRHILKARCDPVPAANGAIRFHCDPTFWAKNVVNLGNLVIESKPAPGYTPNVVVGQVPPGTNHISKTPGQINLAQLRLQHMQQQVYAQKHQQLQQMRMQQPPAPVPTTTTTTQQHPRQAAPQMLQQQPPRLISVQTMQRGNMNCGAFQAHQMRLAQNAARIPGIPRHSGPQYSMMQPHLQRQHSNPGHAGPFPVVSVHNTTINPTSPTTATMANANRGPTSPSVTAIELIPSVTNPENLPSLPDIPPIQLEDAGSSSLDNLLSRYISGSHLPPQPTSTMNPSPGPSALSPGSSGLSNSHTPVRPPSTSSTGSRGSCGSSGRTAEKTSLSFKSDQVKVKQEPGTEDEICSFSGGVKQEKTEDGRRSACMLSSPESSLTPPLSTNLHLESELDALASLENHVKIEPADMNESCKQSGLSSLVNGKSPIRSLMHRSARIGGDGNNKDDDPNEDWCAVCQNGGDLLCCEKCPKVFHLTCHVPTLLSFPSGDWICTFCRDIGKPEVEYDCDNLQHSKKGKTAQGLSPVDQRKCERLLLYLYCHELSIEFQEPVPASIPNYYKIIKKPMDLSTVKKKLQKKHSQHYQIPDDFVADVRLIFKNCERFNEMMKVVQVYADTQEINLKADSEVAQAGKAVALYFEDKLTEIYSDRTFAPLPEFEQEEDDGEVTEDSDEDFIQPRRKRLKSDERPVHIKXNDMDLNQLFKKKKTKKKKKTQKTQKTFKCCWNILPTVGTSLKKLIAFTQY

SEQ ID NO: 1307 - protein, 1161 aa, Homo Sapiens
  misc_feature (1111)..(1111): Xaa can be any naturally occurring amino acid
MAENKGGGEAESGGGGSGSAPVTAGAAGPAAQEAEPPLTAVLVEEEEEEGGRAGAEGGAAGPDDGGVAAASSGSAQAASSPAASVGTGVAGGAVSTPAPAPASAPAPGPSAGPPPGPPASLLDTCAVCQQSLQSRREAEPKLLPCLHSFCLRCLPEPERQLSVPIPGGSNGDIQQVGVIRCPVCRQECRQIDLVDNYFVKDTSEAPSSSDEKSEQVCTSCEDNASAVGFCVECGEWLCKTCIEAHQRVKFTKDHLIRKKEDVSESVGASGQRPVFCPVHKQEQLKLFCETCDRLTCRDCQLLEHKEHRYQFLEEAFQNQKGAIENLLAKLLEKKNYVHFAATQVQNRIKEVNETNKRVEQEIKVAIFTLINEINKKGKSLLQQLENVTKERQMKLLQQQNDITGLSRQVKHVMNFTNWAIASGSSTALLYSKRLITFQLRHILKARCDPVPAANGAIRFHCDPTFWAKNVVNLGNLVIESKPAPGYTPNVVVGQVPPGTNHISKTPGQINLAQLRLQHMQQQVYAQKHQQLQQMRMQQPPAPVPTTTTTTQQHPRQAAPQMLQQQPPRLISVQTMQRGNMNCGAFQAHQMRLAQNAARIPGIPRHSGPQYSMMQPHLQRQHSNPGHAGPFPVVSVHNTTINPTSPTTATMANANRGPTSPSVTAIELIPSVTNPENLPSLPDIPPIQLEDAGSSSLDNLLSRYISGSHLPPQPTSTMNPSPGPSALSPGSSGLSNSHTPVRPPSTSSTGSRGSCGSSGRTAEKTSLSFKSDQVKVKQEPGTEDEICSFSGGVKQEKTEDGRRSACMLSSPESSLTPPLSTNLHLESELDALASLENHVKIEPADMNESCKQSGLSSLVNGKSPIRSLMHRSARIGGDGNNKDDDPNEDWCAVCQNGGDLLCCEKCPKVFHLTCHVPTLLSFPSGDWICTFCRDIGKPEVEYDCDNLQHSKKGKTAQGLSPVDQRKCERLLLYLYCHELSIEFQEPVPASIPNYYKIIKKPMDLSTVKKKLQKKHSQHYQIPDDFVADVRLIFKNCERFNEADSEVAQAGKAVALYFEDKLTEIYSDRTFAPLPEFEQEEDDGEVTEDSDEDFIQPRRKRLKSDERPVHIKXNDMDLNQLFKKKKTKKKKKTQKTQKTFKCCWNILPTVGTSLKKLIAFTQY

SEQ ID NO: 1308 - protein, 1988 aa, Homo Sapiens
  misc_feature (1980)..(1980): Xaa can be any naturally occurring amino acid
MSSWLGGLGSGLGQSLGQVGGSLASLTGQISNFTKDMLMEGTEEVEAELPDSRTKEIEAIHAILRSENERLKKLCTDLEEKHEASEIQIKQQSTSYRNQLQQKEVEISHLKARQIALQDQLLKLQSAAQSVPSGAGVPATTASSSFAYGISHHPSAFHDDDMDFGDIISSQQEINRLSNEVSRLESEVGHWRHIAQTSKAQGTDNSDQSEICKLQNIIKELKQNRSQEIDDHQHEMSVLQNAHQQKLTEISRRHREELSDYEERIEELENLLQQGGSGVIETDLSKIYEMQKTIQVLQIEKVESTKKMEQLEDKIKDINKKLSSAENDRDILRREQEQLNVEKRQIMEECENLKLECSKLQPSAVKQSDTMTEKERILAQSASVEEVFRLQQALSDAENEIMRLSSLNQDNSLAEDNLKLKMRIEVLEKEKSLLSQEKEELQMSLLKLNNEYEVIKSTATRDISLDSELHDLRLNLEAKEQELNQSISEKETLIAEIEELDRQNQEATKHMILIKDQLSKQQNEGDSIISKLKQDLNDEKKRVHQLEDDKMDITKELDVQKEKLIQSEVALNDLHLTKQKLEDKVENLVDQLNKSQESNVSIQKENLELKEHIRQNEEELSRIRNELMQSLNQDSNSNFKDTLLKEREAEVRNLKQNLSELEQLNENLKKVAFDVKMENEKLVLACEDVRHQLEECLAGNNQLSLEKNTIVETLKMEKGEIEAELCWAKKRLLEEANKYEKTIEELSNARNLNTSALQLEHEHLIKLNQKKDMEIAELKKNIEQMDTDHKETKDVLSSSLEEQKQLTQLINKKEIFIEKLKERSSKLQEELDKYSQALRKNEILRQTIEEKDRSLGSMKEENNHLQEELERLREEQSRTAPVADPKTLDSVTELASEVSQLNTIKEHLEEEIKHHQKIIEDQNQSKMQLLQSLQEQKKEMDEFRYQHEQMNATHTQLFLEKDEEIKSLQKTIEQIKTQLHEERQDIQTDNSDIFQETKVQSLNIENGSEKHDLSKAETERLVKGIKERELEIKLLNEKNISLTKQIDQLSKDEVGKLTQIIQQKDLEIQALHARISSTSHTQDVVYLQQQLQAYAMEREKVFAVLNEKTRENSHLKTEYHKMMDIVAAKEAALIKLQDENKKLSTRFESSGQDMFRETIQNLSRIIREKDIEIDALSQKCQTLLAVLQTSSTGNEAGGVNSHQFEELLQERDKLKQQVKKMEEWKQQVMTTVQNMQHESAQLQEELHQLQAQVLVDSDNNSKLQVDYTGLIQSYEQNETKLKNFGQELAQVQHSIGQLCNTKDLLLGKLDIISPQLSSASLLTPQSAECLRASKSEVLSESSELLQQELEELRKSLQEKDATIRTLQENNHRLSDSIAATSELERKEHEQTDSEIKQLKEKQDVLQKLLKEKDLLIKAKSDQLLSSNENFTNKVNENELLRQAVTNLKERILILEMDIGKLKGENEKIVETYRGKETEYQALQETNMKFSMMLREKEFECHSMKEKALAFEQLLKEKEQGKTGELNQLLNAVKSMQEKTVVFQQERDQVMLALKQKQMENTALQNEVQRLRDKEFRSNQELERLRNHLLESEDSYTREALAAEDREAKLRKKVTVLEEKLVSSSNAMENASHQASVQVESLQEQLNVVSKQRDETALQLSVSQEQVKQYALSLANLQMVLEHFQQEEKAMYSAELEKQKQLIAEWKKNAENLEGKVISLQECLDEANAALDSASRLTEQLDVKEEQIEELKRQNELRQEMLDDVQKKLMSLANSSEGKVDKVLMRNLFIGHFHTPKNQRHEVLRLMGSILGVRREEMEQLFHDDQGSVTRWMTGWLGGGSKSVPNTPLRPNQQSVVNSSFSELFVKFLETESHPSIPPPKLSVHDMKPLDSPGRRKRDTNAPESFKDTAESRSGRRTDVNPFLAPRSAAVPLINPAGLGPGGPGHLLLKPISDVLPTFTPLPALPDNSAGVVLKDLLKQXMILKPETI

SEQ ID NO: 1309 - protein, 1540 aa, Homo Sapiens
  misc_feature (1504)..(1504): Xaa can be any naturally occurring amino acid
MEPSALRKAGSEQEEGFEGLPRRVTDLGMVSNLRRSNSSLFKSWRLQCPFGNNDKQESLSSWIPENIKKKECVYFVESSKLSDAGKVVCQCGYTHEQHLEEATKPHTFQGTQWDPKKHVQEMPTDAFGDIVFTGLSQKVKKYVRVSQDTPSSVIYHLMTQHWGLDVPNLLISVTGGAKNFNMKPRLKSIFRRGLVKVAQTTGAWIITGGSHTGVMKQVGEAVRDFSLSSSYKEGELITIGVATWGTVHRREGLIHPTGSFPAEYILDEDGQGNLTCLDSNHSHFILVDDGTHGQYGVEIPLRTRLEKFISEQTKERGGVAIKIPIVCVVLEGGPGTLHTIDNATTNGTPCVVVEGSGRVADVIAQVANLPVSDITISLIQQKLSVFFQEMFETFTESRIVEWTKKIQDIVRRRQLLTVFREGKDGQQDVDVAILQALLKASRSQDHFGHENWDHQLKLAVAWNRVDIARSEIFMDEWQWKPSDLHPTMTAALISNKPEFVKLFLENGVQLKEFVTWDTLLYLYENLDPSCLFHSKLQKVLVEDPERPACAPAAPRLQMHHVAQVLRELLGDFTQPLYPRPRHNDRLRLLLPVPHVKLNVQGVSLRSLYKRSSGHVTFTMDPIRDLLIWAIVQNRRELAGIIWAQSQDCIAAALACSKILKELSKEEEDTDSSEEMLALAEEYEHRAIGVFTECYRKDEERAQKLLTRVSEAWGKTTCLQLALEAKDMKFVSHGGIQAFLTKVWWGQLSVDNGLWRVTLCMLAFPLLLTGLISFREKRLQDVGTPAARARAFFTAPVVVFHLNILSYFAFLCLFAYVLMVDFQPVPSWCECAIYLWLFSLVCEEMRQLFYDPDECGLMKKAALYFSDFWNKLDVGAILLFVAGLTCRLIPATLYPGRVILSLDFILFCLRLMHIFTISKTLGPKIIIVKRMMKDVFFFLFLLAVWVVSFGVAKQAILIHNERRVDWLFRGAVYHSYLTIFGQIPGYIDGVNFNPEHCSPNGTDPYKPKCPESDATQQRPAFPEWLTVLLLCLYLLFTNILLLNLLIAMFNYTFQQVQEHTDQIWKFQRHDLIEEYHGRPAAPPPFILLSHLQLFIKRVVLKTPAKRHKQLKNKLEKNEEAALLSWEIYLKENYLQNRQFQQKQRPEQKIEDISNKVDAMVDLLDLDPLKRSGSMEQRLASLEEQVAQTARALHWIVRTLRASGFSSEADVPTLASQKAAEEPDAEPGGRKKTEEPGDSYHVNARHLLYPNCPVTRFPVPNEKVPWETEFLIYDPPFYTAERKDAAAMDPMGDTLEPLSTIQYNVVDGLRDRRSFHGPYTVQAGLPLNPMGRTGLRGRGSLSCFGPNHTLYPMVTRWRRNEDGAICRKSIKKMLEVLVVKLPLSEHWALPGGSREPGEMLPRKLKRILRQEHWPSFENLLKCGMEVYKGYMDDPRNTDNAWIETVAVSVHFQDQNDVELNRLNSNLHACDSGASIRWQVVDRRIPLYANHKTLLQKAAAEFGAHYXLCPQAGRLQSIDVPPRNQGFSLLSLARTQAVPGPCT

SEQ ID NO: 1310 - protein, 3840 aa, Homo Sapiens
  misc_feature (3831)..(3831): Xaa can be any naturally occurring amino acid
MAFVATQGATVVDQTTLMKKYLQFVAALTDVNTPDETKLKMMQEVSENFENVTSSPQYSTFLEHIIPRFLTFLQDGEVQFLQEKPAQQLRKLVLEIIHRIPTNEHLRPHTKNVLSVMFRFLETENEENVLICLRIIIELHKQFRPPITQEIHHFLDFVKQIYKELPKVVNRYFENPQVIPENTVPPPEMVGMITTIAVKVNPEREDSETRTHSIIPRGSLSLKVLAELPIIVVLMYQLYKLNIHNVVAEFVPLIMNTIAIQVSAQARQHKLYNKELYADFIAAQIKTLSFLAYIIRIYQELVTKYSQQMVKGMLQLLSNCPAETAHLRKELLIAAKHILTTELRNQFIPCMDKLFDESILIGSGYTARETLRPLAYSTLADLVHHVRQHLPLSDLSLAVQLFAKNIDDESLPSSIQTMSCKLLLNLVDCIRSKSEQESGNGRDVLMRMLEVFVLKFHTIARYQLSAIFKKCKPQSELGAVEAALPGVPTAPAAPGPAPSPAPVPAPPPPPPPPPPATPVTPAPVPPFEKQGEKDKEDKQTFQVTDCRSLVKTLVCGVKTITWGITSCKAPGEAQFIPNKQLQPKETQIYIKLVKYAMQALDIYQVQIAGNGQTYIRVANCQTVRMKEEKEVLEHFAGVFTMMNPLTFKEIFQTTVPYMVERISKNYALQIVANSFLANPTTSALFATILVEYLLDRLPEMGSNVELSNLYLKLFKLVFGSVSLFAAENEQMLKPHLHKIVNSSMELAQTAKEPYNYFLLLRALFRSIGGGSHDLLYQEFLPLLPNLLQGLNMLQSGLHKQHMKDLFVELCLTVPVRLSSLLPYLPMLMDPLVSALNGSQTLVSQGLRTLELCVDNLQPDFLYDHIQPVRAELMQALWRTLRNPADSISHVAYRVLGKFGGSNRKMLKESQKLHYVVTEVQGPSITVEFSDCKASLQLPMEKAIETALDCLKSANTEPYYRRQAWEVIKCFLVAMMSLEDNKHALYQLLAHPNFTEKTIPNVIISHRYKAQDTPARKTFEQALTGAFMSAVIKDLRPSALPFVASLIRHYTMVAVAQQCGPFLLPCYQVGSQPSTAMFHSEENGSKGMDPLVLIDAIAICMAYEEKELCKIGEVALAVIFDVASIILGSKERACQLPLFSYIVERLCACCYEQAWYAKLGGVVSIKFLMERLPLTWVLQNQQTFLKALLFVMMDLTGEVSNGAVAMAKTTLEQLLMRCATPLKDEERAEEIVAAQEKSFHHVTHDLVREVTSPNSTVRKQAMHSLQVLAQVTGKSVTVIMEPHKEVLQDMVPPKKHLLRHQPANAQIGLMEGNTFCTTLQPRLFTMDLNVVEHKVFYTELLNLCEAEDSALTKLPCYKSLPSLVPLRIAALNALAACNYLPQSREKIIAALFKALNSTNSELQEAGEACMRKFLEGATIEVDQIHTHMRPLLMMLGDYRSLTLNVVNRLTSVTRLFPNSFNDKFCDQMMQHLRKWMEVVVITHKGGQRSDGNEMKICSAIINLFHLIPAAPQTLVKPLLEVVMKTERAMLIEAGSPFREPLIKFLTRHPSQTVELFMMEATLNDPQWSRMFMSFLKHKDARPLRDVLAANPNRFITLLLPGGAQTAVRPGSPSTSTMRLDLQFQAIKIISIIVKNDDSWLASQHSLVSQLRRVWVSENFQERHRKENMAATNWKEPKLLAYCLLNYCKRNYGDIELLFQLLRAFTGRFLCNMTFLKEYMEEEIPKNYSIAQKRALFFRFVDFNDPNFGDELKAKVLQHILNPAFLYSFEKGEGEQLLGPPNPEGDNPESITSVFITKVLDPEKQADMLDSLRIYLLQYATLLVEHAPHHIHDNNKNRNSKLRRLMTFAWPCLLSKACVDPACKYSGHLLLAHIIAKFAIHKKIVLQVFHSLLKAHAMEARAIVRQAMAILTPAVPARMEDGHQMLTHWTRKIIVEEGHTVPQLVHILHLIVQHFKVYYPVRHHLVQHMVSAMQRLGFTPSVTIEQRRLAVDLSEVVIKWELQRIKDQQPDSDMDPNSSGEGVNSVSSSIKRGLSVDSAQEVKRFRTATGAISAVFGRSQSLPGADSLLAKPIDKQHTDTVVNFLIRVACQVNDNTNTAGSPGEVLSRRCVNLLKTALRPDMWPKSELKLQWFDKLLMTVEQPNQVNYGNICTGLEVLSFLLTVLQSPAILSSFKPLQRGIAACMTCGNTKVLRAVHSLLSRLMSIFPTEPSTSSVASKYEELECLYAAVGKVIYEGLTNYEKATNANPSQLFGTLMILKSACSNNPSYIDRLISVFMRSLQKMVREHLNPQAASGSTEATSGTSELVMLSLELVKTRLAVMSMEMRKNFIQAILTSLIEKSPDAKILRAVVKIVEEWVKNNSPMAANQTPTLREKSILLVKMMTYIEKRFPEDLELNAQFLDLVNYVYRDETLSGSELTAKLEPAFLSGLRCAQPLIRAKFFEVFDNSMKRRVYERLLYVTCSQNWEAMGNHFWIKQCIELLLAVCEKSTPIGTSCQGAMLPSITNVINLADSHDRAAFAMVTHVKQEPRERENSESKEEDVEIDIELAPGDQTSTPKTKELSEKDIGNQLHMLTNRHDKFLDTLREVKTGALLSAFVQLCHISTTLAEKTWVQLFPRLWKILSDRQQHALAGEISPFLCSGSHQVQRDCQPSALNCFVEAMSQCVPPIPIRPCVLKYLGKTHNLWFRSTLMLEHQAFEKGLSLQIKPKQTTEFYEQESITPPQQEILDSLAELYSLLQEEDMWAGLWQKRCKYSETATAIAYEQHGFFEQAQESYEKAMDKAKKEHERSNASPAIFPEYQLWEDHWIRCSKELNQWEALTEYGQSKGHINPYLVLECAWRVSNWTAMKEALVQVEVSCPKEMAWKVNMYRGYLAICHPEEQQLSFIERLVEMASSLAIREWRRLPHVVSHVHTPLLQAAQQIIELQEAAQINAGLQPTNLGRNNSLHDMKTVVKTWRNRLPIVSDDLSHWSSIFMWRQHHYQAIVTAYENSSQHDPSSNNAMLGVHASASAIIQYGKIARKQGLVNVALDILSRIHTIPTVPIVDCFQKIRQQVKCYLQLAGVMGKNECMQGLEVIESTNLKYFTKEMTAEFYALKGMFLAQINKSEEANKAFSAAVQMHDVLVKAWAMWGDYLENIFVKERQLHLGVSAITCYLHACRHQNESKSRKYLAKVLWLLSFDDDKNTLADAVDKYCIGVPPIQWLAWIPQLLTCLVGSEGKLLLNLISQVGRVYPQAVYFPIRTLYLTLKIEQRERYKSDPGPIRATAPMWRCSRIMHMQRELHPTLLSSLEGIVDQMVWFRENWHEEVLRQLQQGLAKCYSVAFEKSGAVSDAKITPHTLNFVKKLVSTFGVGLENVSNVSTMFSSAASESLARRAQATAQDPVFQKLKGQFTTDFDFSVPGSMKLHNLISKLKKWIKILEAKTKQLPKFFLIEEKCRFLSNFSAQTAEVEIPGEFLMPKPTHYYIKIARFMPRVEIVQKHNTAARRLYIRGHNGKIYPYLVMNDACLTESRREERVLQLLRLLNPCLEKRKETTKRHLFFTVPRVVAVSPQMRLVEDNPSSLSLVEIYKQRCAKKGIEHDNPISRYYDRLATVQARGTQASHQVLRDILKEVQSNMVPRSMLKEWALHTFPNATDYWTFRKMFTIQLALIGFAEFVLHLNRLNPEMLQIAQDTGKLNVAYFRFDINDATGDLDANRPVPFRLTPNISEFLTTIGVSGPLTASMIAVARCFAQPNFKVDGILKTVLRDEIIAWHKKTQEDTSSPLSAAGQPENMDSQQLVSLVQKAVTAIMTRLHNLAQFEGGESKVNTLVAAANSLDNLCRMDPAWHPWLXLWPPRHAGM

SEQ ID NO: 1311 - protein, 1172 aa, Homo Sapiens
  misc_feature (1165)..(1165): Xaa can be any naturally occurring amino acid
MAQQANVGELLAMLDSPMLGVRDDVTAVFKENLNSDRGPMLVNTLVDYYLETSSQPALHILTTLQEPHDKHLLDRINEYVGKAATRLSILSLLGHVIRLQPSWKHKLSQAPLLPSLLKCLKMDTDVVVLTTGVLVLITMLPMIPQSGKQHLLDFFDIFGRLSSWCLKKPGHVAEVYLVHLHASVYALFHRLYGMYPCNFVSFLRSHYSMKENLETFEEVVKPMMEHVRIHPELVTGSKDHELDPRRWKRLETHDVVIECAKISLDPTEASYEDGYSVSHQISARFPHRSADVTTSPYADTQNSYGCATSTPYSTSRLMLLNMPGQLPQTLSSPSTRLITEPPQATLWSPSMVCGMTTPPTSPGNVPPDLSHPYSKVFGTTAGGKGTPLGTPATSPPPAPLCHSDDYVHISLPQATVTPPRKEERMDSARPCLHRQHHLLNDRGSEEPPGSKGSVTLSDLPGFLGDLASEEDSIEKDKEEAAISRELSEITTAEAEPVVPRGGFDSPFYRDSLPGSQRKTHSAASSSQGASVNPEPLHSSLDKLGPDTPKQAFTPIDLPCGSADESPAGDRECQTSLETSIFTPSPCKIPPPTRVGFGSGQPPPYDHLFEVALPKTAHHFVIRKTEELLKKAKGNTEEDGVPSTSPMEVLDRLIQQGADAHSKELNKLPLPSKSVDWTHFGGSPPSDEIRTLRDQLLLLHNQLLYERFKRQQHALRNRRLLRKVIKAAALEEHNAAMKDQLKLQEKDIQMWKVSLQKEQARYNQLQEQRDTMVTKLHSQIRQLQHDREEFYNQSQELQTKLEDCRNMIAELRIELKKANNKVCHTELLLSQVSQKLSNSESVQQQMEFLNRQLLVLGEVNELYLEQLQNKHSDTTKEVEMMKAAYRKELEKNRSHVLQQTQRLDTSQKRILELESHLAKKDHLLLEQKKYLEDVKLQARGQLQAAESRYEAQKRITQVFELEILDLYGRLEKDGLLKKLEEEKAEAAEAAEERLDCCNDGCSDSMVGHNEEASGHNGETKTPRPSSARGSSGSRGGGGSSSSSSELSTPEKPPHQRAGPFSSRWETTMGEASASIPTTVGSLPSSKSFLGMKARELFRNKSESQCDEDGMTSSLSESLKTELGKDLGVEAKIPLNLDGPHPSPPTPDSVGQLHIMDYNETHHEHSXGMMVNQC

SEQ ID NO: 1312 - protein, 631 aa, Homo Sapiens
  misc_feature (607)..(607): Xaa can be any naturally occurring amino acid
MNRLRNAKIYVERAVKKKIFTIQGCYPVIRCLLRRRGWVEKKMVHRSGPTLLPPQKDLDSSAMGDSDTTEDEDEDEDEEFQPSQLFDFDDLLKFDDLDGTHALMSRMVQNEIPYFIWTTRRDVLDCRFLSKDQMINHYARAGSFTTKVGLCLNLRNLPWFDEVDANSFFPRCYCLGAEDDKKAFIEDFWLTAARNVLKLVVKSEWKSYPIQAVEEEASGDKQPKKQEKNPVLVSPEFVDEALCACEEYLSNLAHMDIDKDLEAPLYLTPEGWSLFLQRYYQVVHEGAELRHLDTQVQRCEDILQQLQAVVPQIDMEGDRNIWIVKPGAKSRGRGIMCMDHLEEMLKLVNGNPVVMKDGKWVVQKYIERPLLIFGTKFDLRQWFLVTDWNPLTVWFYRDSYIRFSTQPFSLKNLDNSVHLCNNSIQKHLENSCHRHPLLPPDNMWSSQRFQAHLQEMGAPNAWSTIIVPGMKDAVIHALQTSQDTVQCRKASFELYGADFVFGEDFQPWLIEINASPTMAPSTAVTARLCAGVQADTLRVVIDRMLDRNCDTGAFELIYKQPVTTSPASTPRPSCLLPMYSDTRARSSDDSTASWWALRPCRPQARPXGLYPRLRSSFPSHRTLISRWHPAS

SEQ ID NO: 1313 - protein, 467 aa, Homo Sapiens
  misc_feature (456)..(456): Xaa can be any naturally occurring amino acid
MTTMAAATLLRATPHFSGLAAGRTFLLQGLLRLLKAPALPLLCRGLAVEAKKTYVRDKPHVNVGTIGHVDHGKTTLTAAITKILAEGGGAKFKKYEEIDNAPEERARGITINAAHVEYSTAARHYAHTDCPGHADYVKNMITGTAPLDGCILVVAANDGPMPQTREHLLLARQIGVEHVVVYVNKADAVQDSEMVELVELEIRELLTEFGYKGEETPVIVGSALCALEGRDPELGLKSVQKLLDAVDTYIPVPARDLEKPFLLPVEAVYSVPGRGTVVTGTLERGILKKGDECELLGHSKNIRTVVTGIEMFHKSLERAEAGDNLGALVRGLKREDLRRGLVMVKPGSIKPHQKVEAQVYILSKEEGGRHKPFVSHFMPVMFSLTWDMACRIILPPEKELAMPGEDLKFNLILRQPMILEKGQRFTLRDGNRTIGTGLVTNTLAMTEEEKNIKWGXVCRSLLSFPCV

SEQ ID NO: 1314 - protein, 612 aa, Homo Sapiens
  misc_feature (543)..(543): Xaa can be any naturally occurring amino acid
MPLRDETLREVWASDSGHEEESLSPEAPRRPKQRPAPAQRLRKKRTEAPESPCPTGSKPRKPGAGRTGRPREEPSPDPAQARAPQTVYARFLRDPEAKKRDPRETFLVARAPDAEDEEEEEEEDEEDEEEEAEEKKEKILLPPKKPLREKSSADLKERRAKAQGPRGDLGSPDPPPKPLRVRNKEAPAGEGTKMRKTKKKGSGEADKDPSGSPASARKSPAAMFLVGEGSPDKKALKKKGTPKGARKEEEEEEEAATVIKKSNQKGKAKGKGKKKAKEERAPSPPVEVDEPREFVLRPAPQGRTVRCRLTRDKKGMDRGMYPSYFLHLDTEKKVFLLAGRKRKRSKTANYLISIDPTNLSRGGENFIGKLRSNLLGNRFTVFDNGQNPQRGYSTNVASLRQELAAVIYETNVLGFRGPRRMTVIIPGMSAENERVPIRPRNASDGLLVRWQNKTLESLIELHNKPPVWNDDSGSYTLNFQGRVTQASVKNFQIVHADDPDYIVLQFGRVAEDAFTLDYRYPLCALQAFAIALSSFDGKLACEXPQQPLSAPRARQRGGKDSVEAGRVPPAKLPRKTAPVSGLTSHCLSVTSVLSPAWHRPRQEEPGRRVGRR

SEQ ID NO: 1315 - protein, 564 aa, Homo Sapiens
  misc_feature (528)..(528): Xaa can be any naturally occurring amino acid
MILSSYNTIQSVFCCCCCCSVQKRQMRTQISLSTDEELPEKYTQRRRPWLSQLSNKKQSNTGRVQPSKRKPLPPLPPSEVAEEKIQVKALYDFLPREPCNLALRRAEEYLILEKYNPHWWKARDRLGNEGLIPSNYVTENKITNLEIYEWYHRNITRNQAEHLLRQESKEGAFIVRDSRHLGSYTISVFMGARRSTEAAIKHYQIKKNDSGQWYVAERHAFQSIPELIWYHQHNAAGLMTRLRYPVGLMGSCLPATAGFSYEKWEIDPSELAFIKEIGSGQFGVVHLGEWRSHIQVAIKAINEGSMSEEDFIEEAKVMMKLSHSKLVQLYGVCIQRKPLYIVTEFMENGCLLNYLRENKGKLRKEMLLSVCQDICEGMEYLERNGYIHRDLAARNCLVSSTCIVKISDFGMTRYVLDDEYVSSFGAKFPIKWSPPEVFLFNKYSSKSDVWSFGVLMWEVFTEGKMPFENKSNLQVVEAISEGFRLYRPHLAPMSIYEVMYSCWHEKPEGRPTFAELLRAVTEIAETWXPETECQPKESSCKTVIYCEYLHHMGSLMVNIFLQSC

SEQ ID NO: 1316 - protein, 112 aa, Homo Sapiens
  misc_feature (106)..(106): Xaa can be any naturally occurring amino acid
MVKQIESKTAFQEALDAAGDKLVVVDFSATWCGPCKMIKPFFHSLSEKYSNVIFLEVDVDDCQDVASECEVKCMPTFQFFKKGQKVGEFSGANKEKLEATINELVXSCFLKI

SEQ ID NO: 1317 - protein, 490 aa, Homo Sapiens
  misc_feature (464)..(464): Xaa can be any naturally occurring amino acid
MADGEEPEKKRRRIEELLAEKMAVDGGCGDTGDWEGRWNHVKKFLERSGPFTHPDFEPSTESLQFLLDTCKVLVIGAGGLGCELLKNLALSGFRQIHVIDMDTIDVSNLNRQFLFRPKDIGRPKAEVAAEFLNDRVPNCNVVPHFNKIQDFNDTFYRQFHIIVCGLDSIIARRWINGMLISLLNYEDGVLDPSSIVPLIDGGTEGFKGNARVILPGMTACIECTLELYPPQVNFPMCTIASMPRLPEHCIEYVRMLQWPKEQPFGEGVPLDGDDPEHIQWIFQKSLERASQYNIRGVTYRLTQGVVKRIIPAVASTNAVIAAVCATEVFKIATSAYIPLNNYLVFNDVDGLYTYTFEAERKENCPACSQLPQNIQFSPSAKLQEVLDYLTNSASLQMKSPAITATLEGKNRTLYLQSVTSIEERTRPNLSKTLKELGLVDGQELAVADVTTPQTVLFKLHFTSXGKSPHNRKLMEIIYFVDAKKLNRCHF

SEQ ID NO: 1318 - protein, 187 aa, Homo Sapiens
  misc_feature (166)..(166): Xaa can be any naturally occurring amino acid
MAGTALKRLMAEYKQLTLNPPEGIVAGPMNEENFFEWEALIMGPEDTCFEFGVFPAILSFPLDYPLSPPKMRFTCEMFHPNIYPDGRVCISILHAPGDDPMGYESSAERWSPVQSVEKILLSVVSMLAEPNDESGANVDASKMWRDDREQFYKIAKQIVQKSLGLXDLASHRRAHTAKQLSILPRHT

SEQ ID NO: 1319 - protein, 959 aa, Homo Sapiens
  misc_feature (728)..(728): Xaa can be any naturally occurring amino acid
MNGEADCPTDLEMAAPKGQDRWSQEDMLTLLECMKNNLPSNDSSKFKTTESHMDWEKVAFKDFSGDMCKLKWVEISNEVRKFRTLTELILDAQEHVKNPYKGKKLKKHPDFPKKPLTPYFRFFMEKRAKYAKLHPEMSNLDLTKILSKKYKELPEKKKMKYIQDFQREKQEFERNLARFREDHPDLIQNAKKSDIPEKPKTPQQLWYTHEKKVYLKVRPDEIMRDYIQKHPELNISEEGITKSTLTKAERQLKDKFDGRPTKPPPNSYSLYCAELMANMKDVPSTERMVLCSQQWKLLSQKEKDAYHKKCDQKKKDYEVELLRFLESLPEEEQQRVLGEEKMLNINKKQATSPASKKPAQEGGKGGSEKPKRPVSAMFIFSEEKRRQLQEERPELSESELTRLLARMWNDLSEKKKAKYKAREAALKAQSERKPGGEREERGKLPESPKRAEEIWQQSVIGDYLARFKNDRVKALKAMEMTWNNMEKKEKLMWIKKAAEDQKRYERELSEMRAPPAATNSSKKMKFQGEPKKPPMNGYQKFSQELLSNGELNHLPLKERMVEIGSRWQRISQSQKEHYKKLAEEQQKQYKVHLDLWVKSLSPQDRAAYKEYISNKRKSMTKLRGPNPKSSRTTLQSKSESEEDDEEDEDDEDEDEEEEDDENGDSSEDGGDSSESSSEDESEDGDENEEDDEDEDDDEDDDEDEDNESEGSSSSSSSSGDSSDSDSNXGSAPPQGSQGEPRSSPPQLTTFVSPPCSVPCPPGLPHFLSFFKKKKKYGGGRGLEEPRPGLCSLRDISPWGSSSRDSNYQTKPAPDQPGPPHPLLHLRFRHGQWTGEWGWGVPKSLMRPSTPAAQSKVGWKLGEDPFLPRGACHLDPCIGTGGREHGEEEGRCLQENRHCPGGPLPCPLQEGAAWTRSWGRGQKCFLYMCIYFFLSSELSTRRFLPISAAVSVVISGRGRV

SEQ ID NO: 1320 - protein, 996 aa, Homo Sapiens
  misc_feature (765)..(765): Xaa can be any naturally occurring amino acid
MNGEADCPTDLEMAAPKGQDRWSQEDMLTLLECMKNNLPSNDSSKFKTTESHMDWEKVAFKDFSGDMCKLKWVEISNEVRKFRTLTELILDAQEHVKNPYKGKKLKKHPDFPKKPLTPYFRFFMEKRAKYAKLHPEMSNLDLTKILSKKYKELPEKKKMKYIQDFQREKQEFERNLARFREDHPDLIQNAKKSDIPEKPKTPQQLWYTHEKKVYLKVRPDATTKEVKDSLGKQWSQLSDKKRLKWIHKALEQRKEYEEIMRDYIQKHPELNISEEGITKSTLTKAERQLKDKFDGRPTKPPPNSYSLYCAELMANMKDVPSTERMVLCSQQWKLLSQKEKDAYHKKCDQKKKDYEVELLRFLESLPEEEQQRVLGEEKMLNINKKQATSPASKKPAQEGGKGGSEKPKRPVSAMFIFSEEKRRQLQEERPELSESELTRLLARMWNDLSEKKKAKYKAREAALKAQSERKPGGEREERGKLPESPKRAEEIWQQSVIGDYLARFKNDRVKALKAMEMTWNNMEKKEKLMWIKKAAEDQKRYERELSEMRAPPAATNSSKKMKFQGEPKKPPMNGYQKFSQELLSNGELNHLPLKERMVEIGSRWQRISQSQKEHYKKLAEEQQKQYKVHLDLWVKSLSPQDRAAYKEYISNKRKSMTKLRGPNPKSSRTTLQSKSESEEDDEEDEDDEDEDEEEEDDENGDSSEDGGDSSESSSEDESEDGDENEEDDEDEDDDEDDDEDEDNESEGSSSSSSSSGDSSDSDSNXGSAPPQGSQGEPRSSPPQLTTFVSPPCSVPCPPGLPHFLSFFKKKKKYGGGRGLEEPRPGLCSLRDISPWGSSSRDSNYQTKPAPDQPGPPHPLLHLRFRHGQWTGEWGWGVPKSLMRPSTPAAQSKVGWKLGEDPFLPRGACHLDPCIGTGGREHGEEEGRCLQENRHCPGGPLPCPLQEGAAWTRSWGRGQKCFLYMCIYFFLSSELSTRRFLPISAAVSVVISGRGRV

SEQ ID NO: 1321 - protein, 275 aa, Homo Sapiens
  misc_feature (224)..(224): Xaa can be any naturally occurring amino acid
MQLKPMEINPEMLNKVLSRLGVAGQWRFVDVLGLEEESLGSVPAPACALLLLFPLTAQHENFRKKQIEELKGQEVSPKVYFMKQTIGNSCGTIGLIHAVANNQDKLGFEDGSVLKQFLSETEKMSPEDRAKCFEKNEAIQAAHDAVAQEGQCRVDDKVNFHFILFNNVDGHLYELDGRMPFPVNHGASSEDTLLKDAAKVCREFTEREQGEVRFSAVALCKAAXCSVGGTLLISPLPFNMKIYTPPCSLKCFSTCETQLFFCSADTPSPQPHPGT

SEQ ID NO: 1322 - protein, 880 aa, Homo Sapiens
  misc_feature (859)..(859): Xaa can be any naturally occurring amino acid
MAELSEEALLSVLPTIRVPKAGDRVHKDECAFSFDTPESEGGLYICMNTFLGFGKQYVERHFNKTGQRVYLHLRRTRRPKEEDPATGTGDPPRKKPTRLAIGVEGGFDLSEEKFELDEDVKIVILPDYLEIARDGLGGLPDIVRDRVTSAVEALLSADSASRKQEVQAWDGEVRQVSKHAFSLKQLDNPARIPPCGWKCSKCDMRENLWLNLTDGSILCGRRYFDGSGGNNHAVEHYRETGYPLAVKLGTITPDGADVYSYDEDDMVLDPSLAEHLSHFGIDMLKMQKTDKTMTELEIDMNQRIGEWELIQESGVPLKPLFGPGYTGIRNLGNSCYLNSVVQVLFSIPDFQRKYVDKLEKIFQNAPTDPTQDFSTQVAKLGHGLLSGEYSKPVPESGDGERVPEQKEVQDGIAPRMFKALIGKGHPEFSTNRQQDAQEFFLHLINMVERNCRSSENPNEVFRFLVEEKIKCLATEKVKYTQRVDYIMQLPVPMDAALNKEELLEYEEKKRQAEEEKMALPELVRAQVPFSSCLEAYGAPEQVDDFWSTALQAKSVAVKTTRFASFPDYLVIQIKKFTFGLDWVPKKLDVSIEMPEELDISQLRGTGLQPGEEELPDIAPPLVTPDEPKGSLGFYGNEDEDSFCSPHFSSPTSPMLDESVIIQLVEMGFPMDACRKAVYYTGNSGAEAAMNWVMSHMDDPDFANPLILPGSSGPGSTSAAADPPPEDCVTTIVSMGFSRDQALKALRATNNSLERAVDWIFSHIDDLDAEAAMDISEGRSAADSISESVPVGPKVRDGPGKYQLFAFISHMGTSTMCGHYVCHIKKEGRWVIYNDQKVCASEKPPKDLGYIYFYQRVASXEPASPLTNEGRGRPPGMRERG

SEQ ID NO: 1323 - protein, 857 aa, Homo Sapiens
  misc_feature (836)..(836): Xaa can be any naturally occurring amino acid
MAELSEEALLSVLPTIRVPKAGDRVHKDECAFSFDTPESEGGLYICMNTFLGFGKQYVERHFNKTGQRVYLHLRRTRRPKEEDPATGTGDPPRKKPTRLAIGVEGGFDLSEEKFELDEDVKIVILPDYLEIARDGLGGLPDIVRDRVTSAVEALLSADSASRKQEVQAWDGEVRQVSKHAFSLKQLDNPARIPPCGWKCSKCDMRENLWLNLTDGSILCGRRYFDGSGGNNHAVEHYRETGYPLAVKLGTITPDGADVYSYDEDDMVLDPSLAEHLSHFGIDMLKMQKTDKTMTELEIDMNQRIGEWELIQESGVPLKPLFGPGYTGIRNLGNSCYLNSVVQVLFSIPDFQRKYVDKLEKIFQNAPTDPTQDFSTQVAKLGHGLLSGEYSKPVPESGDGERVPEQKEVQDGIAPRMFKALIGKGHPEFSTNRQQDAQEFFLHLINMVERNCRSSENPNEVFRFLVEEKIKCLATEKVKYTQRVDYIMQLPVPMDAALNKEELLEYEEKKRQAEEEKMALPELVRAQVPFSSCLEAYGAPEQVDDFWSTALQAKSVAVKTTRFASFPDYLVIQIKKFTFGLDWVPKKLDVSIEMPEELDISQLRGTGLQPGEEELPDIAPPLVTPDEPKAPMLDESVIIQLVEMGFPMDACRKAVYYTGNSGAEAAMNWVMSHMDDPDFANPLILPGSSGPGSTSAAADPPPEDCVTTIVSMGFSRDQALKALRATNNSLERAVDWIFSHIDDLDAEAAMDISEGRSAADSISESVPVGPKVRDGPGKYQLFAFISHMGTSTMCGHYVCHIKKEGRWVIYNDQKVCASEKPPKDLGYIYFYQRVASXEPASPLTNEGRGRPPGMRERG

SEQ ID NO: 1324 - protein, 1129 aa, Homo Sapiens
  misc_feature (1119)..(1119): Xaa can be any naturally occurring amino acid
MPAVASVPKELYLSSSLKDLNKKTEVKPEKISTKSYVHSALKIFKTAEECRLDRDEERAYVLYMKYVTVYNLIKKRPDFKQQQDYFHSILGPGNIKKAVEEAERLSESLKLRYEEAEVRKKLEEKDRQEEAQRLQQKRQETGREDGGTLAKGSLENVLDSKDKTQKSNGEKNEKCETKEKGAITAKELYTMMTDKNISLIIMDARRMQDYQDSCILHSLSVPEEAISPGVTASWIEAHLPDDSKDTWKKRGNVEYVVLLDWFSSAKDLQIGTTLRSLKDALFKWESKTVLRNEPLVLEGGYENWLLCYPQYTTNAKVTPPPRRQNEEVSISLDFTYPSLEESIPSKPAAQTPPASIEVDENIELISGQNERMGPLNISTPVEPVAASKSDVSPIIQPVPSIKNVPQIDRTKKPAVKLPEEHRIKSESTNHEQQSPQSGKVIPDRSTKPVVFSPTLMLTDEEKARIHAETALLMEKNKQEKELRERQQEEQKEKLRKEEQEQKAKKKQEAEENEITEKQQKAKEEMGKKESEQAKKEDKETSAKRGKEITGVKRQSKSEHETSDAKKSVEDRGKRCPTPEIQKKSTGDVPHTSVTGDSGSGKPFKIKGQPESGILRTGTFREDTDDTERNKAQREPLTRARSEEMGRIVPGLPSGWAKFLDPITGTFRYYHSPTNTVHMYPPEMAPSSAPPSTPPTHKAKPQIPAERDREPSKLKRSHSSPDITQAIQEEEKRKPTVTPTVNRENKPTCYPKAEISRLSASQIRNLNPVFGGSGPALTGLRNLGNTCYMNSILQCLCNAPHLADYFNRNCYQDDINRSNLLGHKGEVAEEFGIIMKALWTGQYRYISPKDFKITIGKINDQFAGYSQQDSQELLLFLMDGLHEDLNKADNRKRYKEENNDHLDDFKAAEHAWQKHKQLNESIIVALFQGQFKSTVQCLTCHKKSRAFEAFMYLSLPLASTSKCTLQDCLRLFSKEEKLTDNNRFYCSHCRARRDSLKKIEIWKLPPVLLVHLKRFSYDGRWKQKLQTSVDFPLENLDLSQYVIGPKNNLKKYNLFSVSNHYGGLDGGHYTAYCKNAARQRWFKFDDHEVSDISVSSVKSSAAYILFYTSLGPRVTDVATXGDIGYKLVIF

SEQ ID NO: 1325 - protein, 131 aa, Homo Sapiens
  misc_feature (125)..(125): Xaa can be any naturally occurring amino acid
MYKLASCCLLFIGFLNPLLSLPLLDSREISFQLSAPHEDARLTPEELERASLLQILPEMLGAERGDILRKADSSTNIFNPRGNLRKFQDFSGQDPNILLSHLLARIWKPYKKRETPDCFWKYCVXSEISIC

SEQ ID NO: 1326 - protein, 146 aa, Homo Sapiens
  misc_feature (140)..(140): Xaa can be any naturally occurring amino acid
METNVFHLMLCVTSARTHKSTSLCFGHFNSYPSLPLIHDLLLEISFQLSAPHEDARLTPEELERASLLQILPEMLGAERGDILRKADSSTNIFNPRGNLRKFQDFSGQDPNILLSHLLARIWKPYKKRETPDCFWKYCVXSEISIC

SEQ ID NO: 1327 - protein, 1106 aa, Homo Sapiens
  misc_feature (1080)..(1080): Xaa can be any naturally occurring amino acid
MKSCAVSLTTAAVAFGDEAKKMAEGKASRESEEESVSLTVEEREALGGMDSRLFGFVRLHEDGARTKTLLGKAVRCYESLILKAEGKVESDFFCQLGHFNLLLEDYSKALSAYQRYYSLQADYWKNAAFLYGLGLVYFYYNAFHWAIKAFQDVLYVDPSFCRAKEIHLRLGLMFKVNTDYKSSLKHFQLALIDCNPCTLSNAEIQFHIAHLYETQRKYHSAKEAYEQLLQTENLPAQVKATVLQQLGWMHHNMDLVGDKATKESYAIQYLQKSLEADPNSGQSWYFLGRCYSSIGKVQDAFISYRQSIDKSEASADTWCSIGVLYQQQNQPMDALQAYICAVQLDHGHAAAWMDLGTLYESCNQPQDAIKCYLNAARSKRCSNTSTLAARIKFLQNGSDNWNGGQSLSHHPVQQVYSLCLTPQKLQHLEQLRANRDNLNPAQKHQLEQLESQFVLMQQMRHKEVAQVRTTGIHNGAITDSSLPTNSVSNRQPHGALTRVSSVSQPGVRPACVEKLLSSGAFSAGCIPCGTSKILGSTDTILLGSNCIAGSESNGNVPYLQQNTHTLPHNHTDLNSSTEEPWRKQLSNSAQGLHKSQSSCLSGPNEEQPLFSTGSAQYHQATSTGIKKANEHLTLPSNSVPQGDADSHLSCHTATSGGQQGIMFTKESKPSKNRSLVPETSRHTGDTSNGCADVKGLSNHVHQLIADAVSSPNHGDSPNLLIADNPQLSALLIGKANGNVGTGTCDKVNNIHPAVHTKTDHSVASSPSSAISTATPSPKSTEQRSINSVTSLNSPHSGLHTVNGEGLGKSQSSTKVDLPLASHRSTSQILPSMSVSICPSSTEVLKACRNPGKNGLSNSCILLDKCPPPRPPTSPYPPLPKDKLNPPTPSIYLENKRDAFFPPLHQFCTNPKNPVTVIRGLAGALKLDLGLFSTKTLVEANNEHMVEVRTQLLQPADENWDPTGTKKIWRCESNRSHTTIAKYAQYQASSFQESLRAGMQWCDLSSLQPPPPGFKRFSHLSLPNSWNYRHLPSCPTNFCIFVETGFHHVGQACLELLTSGGLLASASQSAGITGVSHHARXTFKNVSKITVCKTHIANGEIKFLLYI

SEQ ID NO: 1328 - protein, 3464 aa, Homo Sapiens
  misc_feature (3397)..(3397): Xaa can be any naturally occurring amino acid
MFINIKSILWMCSTLIVTHALHKVKVGKSPPVRGSLSGKVSLPCHFSTMPTLPPSYNTSEFLRIKWSKIEVDKNGKDLKETTVLVAQNGNIKIGQDYKGRVSVPTHPEAVGDASLTVVKLLASDAGLYRCDVMYGIEDTQDTVSLTVDGVVFHYRAATSRYTLNFEAAQKACLDVGAVIATPEQLFAAYEDGFEQCDAGWLADQTVRYPIRAPRVGCYGDKMGKAGVRTYGFRSPQETYDVYCYVDHLDGDVFHLTVPSKFTFEEAAKECENQDARLATVGELQAAWRNGFDQCDYGWLSDASVRHPVTVARAQCGGGLLGVRTLYRFENQTGFPPPDSRFDAYCFKPKEATTIDLSILAETASPSLSKEPQMVSDRTTPIIPLVDELPVIPTEFPPVGNIVSFEQKATVQPQAITDSLATKLPTPTGSTKKPWDMDDYSPSASGPLGKLDISEIKEEVLQSTTGVSHYATDSWDGVVEDKQTQESVTQIEQIEVGPLVTSMEILKHIPSKEFPVTETPLVTARMILESKTEKKMVSTVSELVTTGHYGFTLGEEDDEDRTLTVGSDESTLIFDQIPEVITVSKTSEDTIHTHLEDLESVSASTTVSPLIMPDNNGSSMDDWEERQTSGRITEEFLGKYLSTTPFPSQHRTEIELFPYSGDKILVEGISTVIYPSLQTEMTHRRERTETLIPEMRTDTYTDEIQEEITKSPFMGKTEEEVFSGMKLSTSLSEPIHVTESSVEMTKSFDFPTLITKLSAEPTEVRDMEEDFTATPGTTKYDENITTVLLAHGTLSVEAATVSKWSWDEDNTTSKPLESTEPSASSKLPPALLTTVGMNGKDKDIPSFTEDGADEFTLIPDSTQKQLEEVTDEDIAAHGKFTIRFQPTTSTGIAEKSTLRDSTTEEKVPPITSTEGQVYATMEGSALGEVEDVDLSKPVSTVPQFAHTSEVEGLAFVSYSSTQEPTTYVDSSHTIPLSVIPKTDWGVLVPSVPSEDEVLGEPSQDILVIDQTRLEATISPETMRTTKITEGTTQEEFPWKEQTAEKPVPALSSTAWTPKEAVTPLDEQEGDGSAYTVSEDELLTGSERVPVLETTPVGKIDHSVSYPPGAVTEHKVKTDEVVTLTPRIGPKVSLSPGPEQKYETEGSSTTGFTSSLSPFSTHITQLMEETTTEKTSLEDIDLGSGLFEKPKATELIEFSTIKVTVPSDITTAFSSVDRLHTTSAFKPSSAITKKPPLIDREPGEETTSDMVIIGESTSHVPPTTLEDIVAKETETDIDREYFTTSSPPATQPTRPPTVEDKEAFGPQALSTPQPPASTKFHPDINVYIIEVRENKTGRMSDLSVIGHPIDSESKEDEPCSEETDPVHDLMAEILPEFPDIIEIDLYHSEENEEEEEECANATDVTTTPSVQYINGKHLVTTVPKDPEAAEARRGQFESVAPSQNFSDSSESDTHPFVIAKTELSTAVQPNESTETTESLEVTWKPETYPETSEHFSGGEPDVFPTVPFHEEFESGTAKKGAESVTERDTEVGHQAHEHTEPVSLFPEESSGEIAIDQESQKIAFARATEVTFGEEVEKSTSVTYTPTIVPSSASAYVSEEEAVTLIGNPWPDDLLSTKESWVEATPRQVVELSGSSSIPITEGSGEAEEDEDTMFTMVTDLSQRNTTDTLITLDTSRIITESFFEVPATTIYPVSEQPSAKVVPTKFVSETDTSEWISSTTVEEKKRKEEEGTTGTASTFEVYSSTQRSDQLILPFELESPNVATSSDSGTRKSFMSLTTPTQSEREMTDSTPVFTETNTLENLGAQTTEHSSIHQPGVQEGLTTLPRSPASVFMEQGSGEAAADPETTTVSSFSLNVEYAIQAEKEVAGTLSPHVETTFSTEPTGLVLSTVMDRVVAENITQTSREIVISERLGEPNYGAEIRGFSTGFPLEEDFSGDFREYSTVSHPIAKEETVMMEGSGDAAFRDTQTSPSTVPTSVHISHISDSEGPSSTMVSTSAFPWEEFTSSAEGSGEQLVTVSSSVVPVLPSAVQKFSGTASSIIDEGLGEVGTVNEIDRRSTILPTAEVEGTKAPVEKEEVKVSGTVSTNFPQTIEPAKLWSRQEVNPVRQEIESETTSEEQIQEEKSFESPQNSPATEQTIFDSQTFTETELKTTDYSVLTTKKTYSDDKEMKEEDTSLVNMSTPDPDANGLESYTTLPEATEKSHFFLATALVTESIPAEHVVTDSPIKKEESTKHFPKGMRPTIQESDTELLFSGLGSGEEVLPTLPTESVNFTEVEQINNTLYPHTSQVESTSSDKIEDFNRMENVAKEVGPLVSQTDIFEGSGSVTSTTLIEILSDTGAEGPTVAPLPFSTDIGHPQNQTVRWAEEIQTSRPQTITEQDSNKNSSTAEINETTTSSTDFLARAYGFEMAKEFVTSAPKPSDLYYEPSGEGSGEVDIVDSFHTSATTQATRQESSTTFVSDGSLEKHPEVPSAKAVTADGFPTVSVMLPLHSEQNKSSPDPTSTLSNTVSYERSTDGSFQDRFREFEDSTLKPNRKKPTENIIIDLDKEDKDLILTITESTILEILPELTSDKNTIIDIDHTKPVYEDILGMQTDIDTEVPSEPHDSNDESNDDSTQVQEIYEAAVNLSLTEETFEGSADVLASYTQATHDESMTYEDRSQLDHMGFHFTTGIPAPSTETELDVLLPTATSLPIPRKSATVIPEIEGIKAEAKALDDMFESSTLSDGQAIADQSEIIPTLGQFERTQEEYEDKKHAGPSFQPEFSSGAEEALVDHTPYLSIATTHLMDQSVTEVPDVMEGSNPPYYTDTTLAVSTFAKLSSQTPSSPLTIYSGSEASGHTEIPQPSALPGIDVGSSVMSPQDSFKEIHVNIEATFKPSSEEYLHITEPPSLSPDTKLEPSEDDGKPELLEEMEASPTELIAVEGTEILQDFQNKTDGQVSGEAIKMFPTIKTPEAGTVITTADEIELEGATQWPHSTSASATYGVEAGVVPWLSPQTSERPTLSSSPEINPETQAALIRGQDSTIAASEQQVAARILDSNDQATVNPVEFNTEVATPPFSLLETSNETDFLIGINEESVEGTAIYLPGPDRCKMNPCLNGGTCYPTETSYVCTCVPGYSGDQCELDFDECHSNPCRNGATCVDGFNTFRCLCLPSYVGALCEQDTETCDYGWHKFQGQCYKYFAHRRTWDAAERECRLQGAHLTSILSHEEQMFVNRVGHDYQWIGLNDKMFEHDFRWTDGSTLQYENWRPNQPDSFFSAGEDCVVIIWHENGQWNDVPCNYHLTYTCKKGTVACGQPPVVENAKTFGKMKPRYEINSLIRYHCKDGFIQRHLPTIRCLGNGRWAIPKITCMNPSAYQRTYSMKYFKNSSSAKDNSINTSKHDHRWSRRWQESRRXSLKWRTCVFIISAKVLTSCAFPITSRSNYQLVWIFGPPFSHFGLPCSQNILNESIGIQKDSRQNERK

SEQ ID NO: 1329 - protein, 1070 aa, Homo Sapiens
  misc_feature (1067)..(1067): Xaa can be any naturally occurring amino acid
MPVFHTRTIESILEPVAQQISHLVIMHEEGEVDGKAIPDLTAPVAAVQAAVSNLVRVGKETVQTTEDQILKRDMPPAFIKVENACTKLVQAAQMLQSDPYSVPARDYLIDGSRGILSGTSDLLLTFDEAEVRKIIRVCKGILEYLTVAEVVETMEDLVTYTKNLGPGMTKMAKMIDERQQELTHQEHRVMLVNSMNTVKELLPVLISAMKIFVTTKNSKNQGIEEALKNRNFTVEKMSAEINEIIRVLQLTSWDEDAWASKDTEAMKRALASIDSKLNQAKGWLRDPSASPGDAGEQAIRQILDEAGKVGELCAGKERREILGTCKMLGQMTDQVADLRARGQGSSPVAMQKAQQVSQGLDVLTAKVENAARKLEAMTNSKQSIAKKIDAAQNWLADPNGGPEGEEQIRGALAEARKIAELCDDPKERDDILRSLGEISALTSKLADLRRQGKGDSPEARALAKQVATALQNLQTKTNRAVANSRPAKAAVHLEGKIEQAQRWIDNPTVDDRGVGQAAIRGLVAEGHRLANVMMGPYRQDLLAKCDRVDQLTAQLADLAARGEGESPQARALASQLQDSLKDLKARMQEAMTQEVSDVFSDTTTPIKLLAVAATAPPDAPNREEVFDERAANFENHSGKLGATAEKAAAVGTANKSTVEGIQASVKTARELTPQVVSAARILLRNPGNQAAYEHFETMKNQWIDNVEKMTGLVDEAIDTKSLLDASEEAIKKDLDKCKVAMANIQPQMLVAGATSIARRANRILLVAKREVENSEDPKFREAVKAASDELSKTISPMVMDAKAVAGNISDPGLQKSFLDSGYRILGAVAKVREAFQPQEPDFPPPPPDLEQLRLTDELAPPKPPLPEGEVPPPRPPPPEEKDEEFPEQKAGEVINQPMMMAARQLHDEARKWSSKGNDIIAAAKRMALLMAEMSRLVRGGSGTKRALIQCAKDIAKASDEVTRLAKEVAKQCTDKRIRTNLLQVCERIPTISTQLKILSTVKATMLGRTNISDEESEQATEMLVHNAQNLMQSVKETVREAEAASIKIRTDAGFTLRWVRKTPWYQXAPG

SEQ ID NO: 1330 - protein, 1138 aa, Homo Sapiens
  misc_feature (1135)..(1135): Xaa can be any naturally occurring amino acid
MPVFHTRTIESILEPVAQQISHLVIMHEEGEVDGKAIPDLTAPVAAVQAAVSNLVRVGKETVQTTEDQILKRDMPPAFIKVENACTKLVQAAQMLQSDPYSVPARDYLIDGSRGILSGTSDLLLTFDEAEVRKIIRVCKGILEYLTVAEVVETMEDLVTYTKNLGPGMTKMAKMIDERQQELTHQEHRVMLVNSMNTVKELLPVLISAMKIFVTTKNSKNQGIEEALKNRNFTVEKMSAEINEIIRVLQLTSWDEDAWASKDTEAMKRALASIDSKLNQAKGWLRDPSASPGDAGEQAIRQILDEAGKVGELCAGKERREILGTCKMLGQMTDQVADLRARGQGSSPVAMQKAQQVSQGLDVLTAKVENAARKLEAMTNSKQSIAKKIDAAQNWLADPNGGPEGEEQIRGALAEARKIAELCDDPKERDDILRSLGEISALTSKLADLRRQGKGDSPEARALAKQVATALQNLQTKTNRAVANSRPAKAAVHLEGKIEQAQRWIDNPTVDDRGVGQAAIRGLVAEGHRLANVMMGPYRQDLLAKCDRVDQLTAQLADLAARGEGESPQARALASQLQDSLKDLKARMQEAMTQEVSDVFSDTTTPIKLLAVAATAPPDAPNREEVFDERAANFENHSGKLGATAEKAAAVGTANKSTVEGIQASVKTARELTPQVVSAARILLRNPGNQAAYEHFETMKNQWIDNVEKMTGLVDEAIDTKSLLDASEEAIKKDLDKCKVAMANIQPQMLVAGATSIARRANRILLVAKREVENSEDPKFREAVKAASDELSKTISPMVMDAKAVAGNISDPGLQKSFLDSGYRILGAVAKVREAFQPQEPDFPPPPPDLEQLRLTDELAPPKPPLPEGEVPPPRPPPPEEKDEEFPEQKAGEVINQPMMMAARQLHDEARKWSSKPGIPAAEVGIGVVAEADAADAAGFPVPPDMEDDYEPELLLMPSNQPVNQPILAAAQSLHREATKWSSKGNDIIAAAKRMALLMAEMSRLVRGGSGTKRALIQCAKDIAKASDEVTRLAKEVAKQCTDKRIRTNLLQVCERIPTISTQLKILSTVKATMLGRTNISDEESEQATEMLVHNAQNLMQSVKETVREAEAASIKIRTDAGFTLRWVRKTPWYQXAPG

SEQ ID NO: 1331 - protein, 307 aa, Homo Sapiens
  misc_feature (284)..(284): Xaa can be any naturally occurring amino acid
MCNTPTYCDLGKAAKDVFNKGYGFGMVKIDLKTKSCSGVEFSTSGHAYTDTGKASGNLETKYKVCNYGLTFTQKWNTDNTLGTEISWENKLAEGLKLTLDTIFVPNTGKKSGKLKASYKRDCFSVGSNVDIDFSGPTIYGWAVLAFEGWLAGYQMSFDTAKSKLSQNNFALGYKAADFQLHTHVNDGTEFGGSIYQKVNEKIETSINLAWTAGSNNTRFGIAAKYMLDCRTSLSAKVNNASLIGLGYTQTLRPGVKLTLSALIDGKNFSAGGHKVGLGFELEAXCGLRKASDLSLEVKRNEPTMFWP

SEQ ID NO: 1332 - protein, 785 aa, Homo Sapiens
  misc_feature (780)..(780): Xaa can be any naturally occurring amino acid
MTPEFDEEVVFENSPLYQYLQDLGHTDFEICSSLSPKTEKCTTEGQQKPPTRVLPKQGILLKVAETIKSWIFFSQCNKKDDLLHKLDIGFRLDSLHTILQQEVLLQEDVELIELLDPSILSAGQSQQQENGHLPTLCSLATPNIWDLSMLFAFISLLVMLPTWWIVSSWLVWGVILFVYLVIRALRLWRTAKLQVTLKKYSVHLEDMATNSRAFTNLVRKALRLIQETEVISRGFTLVSAACPFNKAGQHPSQHLIGLRKAVYRTLRANFQAARLATLYMLKNYPLNSESDNVTNYICVVPFKELGLGLSEEQISEEEAHNFTDGFSLPALKVLFQLWVAQSSEFFRRLALLLSTANSPPGPLLTPALLPHRILSDVTQGLPHAHSACLEELKRSYEFYRYFETQHQSVPQCLSKTQQKSRELNNVHTAVRSLQLHLKALLNEVIILEDELEKLVCTKETQELVSEAYPILEQKLKLIQPHVQASNNCWEEAISQVDKLLRRNTDKKGKPEIACENPHCTVVPLKQPTLHIADKDPIPEEQELEAYVDDIDIDSDFRKDDFYYLSQEDKERQKREHEESKRVLQELKSVLGFKASEAERQKWKQLLFSDHAVLKSLSPVDPVEPISNSEPSMNSDMGKVSKNDTEEESNKSATTDNEISRTEYLCENSLEGKNKDNSSNEVFPQGAEERMCYQCESEDEPQADGSGLTTAPPTPRDSLQPSIKQRLARLQLSPDFTFTAGLAAEVAARSLSFTTMQEQTFGGEEEEQIIEENKNEIEEKXEPRFI

SEQ ID NO: 1333 - protein, 308 aa, Homo Sapiens
  misc_feature (291)..(291): Xaa can be any naturally occurring amino acid
METPLDVLSRAASLVHADDEKREAALRGEPRMQTLPVASALSSHRTGPPPISPSKRKFSMEPGDEDLDCDNDHVSKMSRIFNPHLNKTANGDCRRDPRERSRSPIERAVAPTMSLHGSHLYTSLPSLGLEQPLALTKNSLDASRPAGLSPTLTPGERQQNRPSVITCASAGARNCNLSHCPIAHSGCAAPGPASYRRPPSAATTCDPVVEEHFRRSLGKNYKEPEPAPNSVSITGSVDDHFAKALGDTWLQIKAAKDGASSSPESASRRGQPASPSAHMVSHSHSPSVVSXRERLLQQHVDLHGLPEL

SEQ ID NO: 1334 - protein, 481 aa, Homo Sapiens
  misc_feature (467)..(467): Xaa can be any naturally occurring amino acid
MSTRSVSSSSYRRMFGGPGTASRPSSSRSYVTTSTRTYSLGSALRPSTSRSLYASSPGGVYATRSSAVRLRSSVPGVRLLQDSVDFSLADAINTEFKNTRTNEKVELQELNDRFANYIDKVRFLEQQNKILLAELEQLKGQGKSRLGDLYEEEMRELRRQVDQLTNDKARVEVERDNLAEDIMRLREKLQEEMLQREEAENTLQSFRQDVDNASLARLDLERKVESLQEEIAFLKKLHEEEIQELQAQIQEQHVQIDVDVSKPDLTAALRDVRQQYESVAAKNLQEAEEWYKSKFADLSEAANRNNDALRQAKQESTEYRRQVQSLTCEVDALKGTNESLERQMREMEENFAVEAANYQDTIGRLQDEIQNMKEEMARHLREYQDLLNVKMALDIEIATYRKLLEGEESRISLPLPNFSSLNLRETNLDSLPLVDTHSKRTLLIKTVETRDGQVINETSQHHDDLEXKLHTLSAAIYYQQE

SEQ ID NO: 1335 - protein, 422 aa, Homo Sapiens
  misc_feature (362)..(362): Xaa can be any naturally occurring amino acid
MTGKAGEALSKPKSETVAKSTSGGAPARCTGFGIQEILGLNKEPPSSHPRAALDGLAPGHLLAARSVLSPAGVGGMGLLGPGGLPGFYTQPTFLEVLSDPQSVHLQPLGRASGPLDTSQTASSDSEDVSSSDRKMSKSALNQTKKRKKRRHRTIFTSYQLEELEKAFNEAHYPDVYAREMLAMKTELPEDRIQVWFQNRRAKWRKREKCWGRSSVMAEYGLYGAMVRHSIPLPESILKSAKDGIMDSCAPWLLGMHKKSLEAAAESGRKPEGERQALPKLDKMEQDERGPDAQAAISQEELRENSIAVLRAKAQEHSTKVLGTVSGPDSLARSTEKPEEEEAMDEDRPAERLSPPQLEDMAXVKARSDAGAPRLCSPRALWCWEMLSEARPRPGLCHPPCSPQVLHHPWWLQAPLGSDSGPC

SEQ ID NO: 1336 - protein, 681 aa, Homo Sapiens
  misc_feature (678)..(678): Xaa can be any naturally occurring amino acid
MAAHHRQNTAGRRKVQVSYVIRDEVEKYNRNGVNALQLDPALNRLFTAGRDSIIRIWSVNQHKQDPYIASMEHHTDWVNDIVLCCNGKTLISASSDTTVKVWNAHKGFCMSTLRTHKDYVKALAYAKDKELVASAGLDRQIFLWDVNTLTALTASNNTVTTSSLSGNKDSIYSLAMNQLGTIIVSGSTEKVLRVWDPRTCAKLMKLKGHTDNVKALLLNRDGTQCLSGSSDGTIRLWSLGQQRCIATYRVHDEGVWALQVNDAFTHVYSGGRDRKIYCTDLRNPDIRVLICEEKAPVLKMELDRSADPPPAIWVATTKSTVNKWTLKGIHNFRASGDYDNDCTNPITPLCTQPDQVIKGGASIIQCHILNDKRHILTKDTNNNVAYWDVLKACKVEDLGKVDFEDEIKKRFKMVYVPNWFSVDLKTGMLTITLDESDCFAAWVSAKDAGFSSPDGSDPKLNLGGLLLQALLEYWPRTHVNPMDEEENEVNHVNGEQENRVQKGNGYFQVPPHTPVIFGEAGGRTLFRLLCRDSGGETESMLLNETVPQWVIDITVDKNMPKFNKIPFYLQPHASSGAKTLKKDRLSASDMLQVRKVMEHVYEKIINLDNESQTTSSSNNEKPGEQEKEEDIAVLAEEKIELLCQDQVLDPNMDLRTVKHFIWKSGGDLTLHYRQKSTXRLG

SEQ ID NO: 1337 - protein, 467 aa, Homo Sapiens
  misc_feature (445)..(445): Xaa can be any naturally occurring amino acid
MKFPASVLASVFLFVAETTAALSLSSTYRSGGDRMWQALTLLFSLLPCALVQLTLLFVHRDLSRDRPLVLLLHLLQLGPLFRCFEVFCIYFQSGNNEEPYVSITKKRQMPKNGLSEEIEKEVGQAEGKLITHRSAFSRASVIQAFLGSAPQLTLQLYISVMQQDVTVGRSLLMTISLLSIVYGALRCNILAIKIKYDEYEVKVKPLAYVCIFLWRSFEIATRVVVLVLFTSVLKTWVVVIILINFFSFFLYPWILFWCSGSPFPENIEKALSRVGTTIVLCFLTLLYTGINMFCWSAVQLKIDSPDLISKSHNWYQLLVYYMIRFIENAILLLLWYLFKTDIYMYVCAPLLVLQLLIGYCTAILFMLVFYQFFHPCKKLFSSSVSEGFQRWLRCFCWACRQQKPCEPIGKEDLQSSRDRDETPSSSKTSPEPGQFLNAEDLCSAXWDPRSQSTGILFSGFDTRYSYK

SEQ ID NO: 1338 - protein, 1133 aa, Homo Sapiens
  misc_feature (1088)..(1088): Xaa can be any naturally occurring amino acid
MADHVQSLAQLENLCKQLYETTDTTTRLQAEKALVEFTNSPDCLSKCQLLLERGSSSYSQLLAATCLTKLVSRTNNPLPLEQRIDIRNYVLNYLATRPKLATFVTQALIQLYARITKLGWFDCQKDDYVFRNAITDVTRFLQDSVEYCIIGVTILSQLTNEINQADTTHPLTKHRKIASSFRDSSLFDIFTLSCNLLKQASGKNLNLNDESQHGLLMQLLKLTHNCLNFDFIGTSTDESSDDLCTVQIPTSWRSAFLDSSTLQLFFDLYHSIPPSFSPLVLSCLVQIASVRRSLFNNAERAKFLSHLVDGVKRILENPQSLSDPNNYHEFCRLLARLKSNYQLGELVKVENYPEVIRLIANFTVTSLQHWEFAPNSVHYLLSLWQRLAASVPYVKATEPHMLETYTPEVTKAYITSRLESVHIILRDGLEDPLEDTGLVQQQLDQLSTIGRCEYEKTCALLVQLFDQSAQSYQELLQSASASPMDIAVQEGRLTWLVYIIGAVIGGRVSFASTDEQDAMDGELVCRVLQLMNLTDSRLAQAGNEKLELAMLSFFEQFRKIYIGDQVQKSSKLYRRLSEVLGLNDETMVLSVFIGKIITNLKYWGRCEPITSKTLQLLNDLSIGYSSVRKLVKLSAVQFMLNNHTSEHFSFLGINNQSNLTDMRCRTTFYTALGRLLMVDLGEDEDQYEQFMLPLTAAFEAVAQMFSTNSFNEQEAKRTLVGLVRDLRGIAFAFNAKTSFMMLFEWIYPSYMPILQRAIELWYHDPACTTPVLKLMAELVHNRSQRLQFDVSSPNGILLFRETSKMITMYGNRILTLGEVPKDQVYALKLKGISICFSMLKAALSGSYVNFGVFRLYGDDALDNALQTFIKLLLSIPHSDLLDYPKLSQSYYSLLEVLTQDHMNFIASLEPHVIMYILSSISEGLTALDTMVCTGCCSCLDHIVTYLFKQLSRSTKKRTTPLNQESDRFLHIMQQHPEMIQQMLSTVLNIIIFEDCRNQWSMSRPLLGLILLNEKYFSDLRNSIVNSQPPEKQQAMHLCFENLMEGIERNLLTKNRDRFTQNLSAFRREVNDSMKNSTYGVNSNDMMSXHLLGLYLYRAASLWFGPEGRTIARERAWLILALFSRGVGKMAKVN

SEQ ID NO: 1339 - protein, 1406 aa, Homo Sapiens
  misc_feature (1371)..(1371): Xaa can be any naturally occurring amino acid
MDPSDFPSPFDPLTLPEKPLAGDLPVDMEFGEDLLESQTAPTRGWAPPGPSPSSGALDLLDTPAGLEKDPGVLDGATELLGLGGLLYKAPSPPEVDHGPEGTLAWDAGDQTLEPGPGGQTPEVVPPDPGAGANSCSPEGLLEPLAPDSPITLQSPHIEEEETTSIATARRGSPGQEEELPQGQPQSPNAPPSPSVGETLGDGINSSQTKPGGSSPPAHPSLPGDGLTAKASEKPPERKRSERVRRAEPPKPEVVDSTESIPVSDEDSDAMVDDPNDEDFVPFRPRRSPRMSLRSSVSQRAGRSAVGTKMTCAHCRTPLQKGQTAYQRKGLPQLFCSSSCLTTFSKKPSGKKTCTFCKKEIWNTKDSVVAQTGSGGSFHEFCTSVCLSLYEAQQQRPIPQSGDPADATRCSICQKTGEVLHEVSNGSVVHRLCSDSCFSKFRANKGLKTNCCDQCGAYIYTKTGSPGPELLFHEGQQKRFCNTTCLGAYKKKNTRVYPCVWCKTLCKNFEMLSHVDRNGKTSLFCSLCCTTSYKVKQAGLTGPPRPCSFCRRSLSDPCYYNKVDRTVYQFCSPSCWTKFQRTSPEGGIHLSCHYCHSLFSGKPEVLDWQDQVFQFCCRDCCEDFKRLRGVVSQCEHCRQEKLLHEKLRFSGVEKSFCSEGCVLLYKQDFTKKLGLCCITCTYCSQTCQRGVTEQLDGSTWDFCSEDCKSKYLLWYCKAARCHACKRQGKLLETIHWRGQIRHFCNQQCLLRFYSQQNQPNLDTQSGPESLLNSQSPESKPQTPSQTKVENSNTVRTPEENGNLGKIPVKTRSAPTAPTPPPPPPPATPRKNKAAMCKPLMQNRGVSCKVEMKSKGSQTEEWKPQVIVLPIPVPIFVPVPMHLYCQKVPVPFSMPIPVPVPMFLPTTLESTDKIVETIEELKVKIPSNPLEADILAMAEMIAEAEELDKASSDLCDLVSNQSAEGLLEDCDLFGPARDDVLAMAVKMANVLDEPGQDLEADFPKNPLDINPSVDFLFDCGLVGPEDVSTEQDLPRTMRKGQKRLVLSESCSRDSMSSQPSCTGLNYSYGVNAWKCWVQSKYANGETSKGDELRFGPKPMRIKEDILACSAAELNYGLAQFVREITRPNGERYEPDSIYYLCLGIQQYLLENNRMVNIFTDLYYLTFVQELNKSLSTWQPTLLPNNTVFSRVEEEHLWECKQLGVYSPFVLLNTLMFFNTKFFGLQTAEEHMQLSFTNVVRQSRKCTTPRGTTKVVSIRYYAPVRQRKGRDTGPGKRKREDEAPILEQRENRMNPLRCPVKFYEFYLSKCPESLRTRNDVFYLQPERSCIAESPLWYSVIPMDRSMLESMLNRILAVREIYEELGRPGEEDLDXARVPSISIFHINVCPVAMSLRVTGPGTNATHSEGP

SEQ ID NO: 1340 - protein, 414 aa, Homo Sapiens
  misc_feature (408)..(408): Xaa can be any naturally occurring amino acid
MAAKMEITLSSNTEASSKQERHIIAKLEEKRGPPLQKNCPDPELCRQSFRRFCYQEVSGPQEALSQLRQLCRQWLQPELHTKEQILELLVMEQFLTILPPEIQARVRHRCPMSSKEIVTLVEDFHRASKKPKQWVAVCMQGQKVLLEKTGSQLGEQELPDFQPQTPRRDLRESSPAEPSQAGAYDRLSPHHWEKSPLLQEPTPKLAGTEAPRMRSDNKENPQQEGAKGAKPCAVSAGRSKGNGLQNPEPRGANMSEPRLSRRQVSSPNAQKPFAHYQRHCRVEYISSPLKSHPLRELKKSKGGKRSLSNRLQHLGHQPTRSAKKPYKCDDCGKSFTWNSELKRHKRVHTGERPYTCGECGNCFGRQSTLKLHQRIHTGEKPYQCGQCGKSFRQSSNLHQHHRLHHGDXKEHSML

SEQ ID NO: 1341 - protein, 1085 aa, Homo Sapiens
  misc_feature (1067)..(1067): Xaa can be any naturally occurring amino acid
MEGLLHYINPAHAISLLSALNEERLKGQLCDVLLIVGDQKFRAHKNVLAASSEYFQSLFTNKENESQTVFQLDFCEPDAFDNVLNYIYSSSLFVEKSSLAAVQELGYSLGISFLTNIVSKTPQAPFPTCPNRKKVFVEDDENSSQKRSVIVCQSRNEAQGKTVSQNQPDVSHTSRPSPSIAVKANTNKPHVPKPIEPLHNLSLTEKSWPKDSSVVYAKSLEHSGSLDDPNRISLVKRNAVLPSKPLQDREAMDDKPGVSGQLPKGKALELALKRPRPPVLSVCSSSETPYLLKETNKGNGQGEDRNLLYYSKLGLVIPSSGSGSGNQSIDRSGPLVKSLLRRSLSMDSQVPVYSPSIDLKSSQGSSSVSSDAPGNVLCALSQKSSLKDCSEKTALDDRPQVLQPHRLRSFSASQSTDREGASPVTEVRIKTEPSSPLSDPSDIIRVTVGDAATTAAASSSSVTRDLSLKTEDDQKDMSRLPAKRRFQADRRLPFKKLKVNEHGSPVSEDNFEEGSSPTLLDADFPDSDLNKDEFGELEGTRPNKKFKCKHCLKIFRSTAGLHRHVNMYHNPEKPYACDICHKRFHTNFKVWTHCQTQHGIVKNPSPASSSHAVLDEKFQRKLIDIVREREIKKALIIKLRRGKPGFQGQSSSQAQQVIKRNLRSRAKGAYICTYCGKAYRFLSQFKQHIKMHPGEKPLGVNKVAKPKEHAPLASPVENKEVYQCRLCNAKLSSLLEQGSHERLCRNAAVCPYCSLRFFSPELKQEHESKCEYKKLTCLECMRTFKSSFSIWRHQVEVHNQNNMAPTENFSLPVLDHNGDVTGSSRPQSQPEPNKVNHIVTTKDDNVFSDSSEQVNFDSEDSSCLPEDLSLSKQLKIQVKEEPVEEAEEEAPEASTAPKEAGPSKEASLWPCEKCGKMFTVHKQLERHQELLCSVKPFICHVCNKAFRTNFRLWSHFQSHMSQASEESAHKESEVCPVPTNSPSPPPLPPPPPLPKIQPLEPDSPTGLSENPTPATEKLFVPQESDTLFYHAPPLSAITFKRQFMCKLCHRTFKTAFSLWSHEQTHNXKTNTFYLWEAVPRFQPEL

SEQ ID NO: 1342 - protein, 559 aa, Homo Sapiens
  misc_feature (514)..(514): Xaa can be any naturally occurring amino acid
MASVLSRRLGKRSLLGARVLGPSASEGPSAAPPSEPLLEGAAPQPFTTSDDTPCQEQPKEVLKAPSTSGLQQVAFQPGQKVYVWYGGQECTGLVEQHSWMEGQVTVWLLEQKLQVCCRVEEVWLAELQGPCPQAPPLEPGAQALAYRPVSRNIDVPKRKSDAVEMDEMMAAMVLTSLSCSPVVQSPPGTEANFSASRAACDPWKESGDISDSGSSTTSGHWSGSSGVSTPSPPHPQASPKYLGDAFGSPQTDHGFETDPDPFLLDEPAPRKRKNSVKVMYKCLWPNCGKVLRSIVGIKRHVKALHLGDTVDSDQFKREEDFYYTEVQLKEESAAAAAAAAAGTPVPGTPTSEPAPTPSMTGLPLSALPPPLHKAQSSGPEHPGPESSLPSGALSKSAPGSFWHIQADHAYQALPSFQIPVSPHIYTSVSWAAAPSAACSLSPVRSRSLSFSEPQQPAPAMKSHLIVTSPPRAQSGARKARGEAKKCRKVYGIEHRDQWCTACRWKKACQRFLDXAVLQVLLCSWPCRQPLTRGQCVTSPQQKPKEKERKHGVWALLAKV

SEQ ID NO: 1343 - protein, 1227 aa, Homo Sapiens
  misc_feature (1192)..(1192): Xaa can be any naturally occurring amino acid
MPGTPGSLEMGLLTFRDVAIEFSPEEWQCLDTAQQNLYRNVMLENYRNLAFLGIALSKPDLITYLEQGKEPWNMKQHEMVDEPTGICPHFPQDFWPEQSMEDSFQKVLLRKYEKCGHENLQLRKGCKSVDECKVHKEGYNKLNQCLTTAQSKVFQCGKYLKVFYKFLNSNRHTIRHTGKKCFKCKKCVKSFCIRLHKTQHKCVYITEKSCKCKECEKTFHWSSTLTNHKEIHTEDKPYKCEECGKAFKQLSTLTTHKIICAKEKIYKCEECGKAFLWSSTLTRHKRIHTGEKPYKCEECGKAFSHSSTLAKHKRIHTGEKPYKCEECGKAFSRSSTLAKHKRIHTGEKPYKCKECGKAFSNSSTLANHKITHTEEKPYKCKECDKAFKRLSTLTKHKIIHAGEKLYKCEECGKAFNRSSNLTIHKFIHTGEKPYKCEECGKAFNWSSSLTKHKRFHTREKPFKCKECGKAFIWSSTLTRHKRIHTGEKPYKCEECGKAFRQSSTLTKHKIIHTGEKPYKFEECGKAFRQSLTLNKHKIIHSREKPYKCKECGKAFKQFSTLTTHKIIHAGKKLYKCEECGKAFNHSSSLSTHKIIHTGEKSYKCEECGKAFLWSSTLRRHKRIHTGEKPYKCEECGKAFSHSSALAKHKRIHTGEKPYKCKECGKAFSNSSTLANHKITHTEEKPYKCKECDKTFKRLSTLTKHKIIHAGEKLYKCEECGKAFNRSSNLTIHKFIHTGEKPYKCEECGKAFNWSSSLTKHKRIHTREKPFKCKECGKAFIWSSTLTRHKRIHTGEKPYKCEECGKAFSRSSTLTKHKTIHTGEKPYKCKECGKAFKHSSALAKHKIIHAGEKLYKCEECGKAFNQSSNLTTHKIIHTKEKPSKSEECDKAFIWSSTLTEHKRIHTREKTYKCEECGKAFSQPSHLTTHKRMHTGEKPYKCEECGKAFSQSSTLTTHKIIHTGEKPYKCEECGKAFRKSSTLTEHKIIHTGEKPYKCEECGKAFSQSSTLTRHTRMHTGEKPYKCEECGKAFNRSSKLTTHKIIHTGEKPYKCEECGKAFISSSTLNGHKRIHTREKPYKCEECGKAFSQSSTLTRHKRLHTGEKPYKCGECGKAFKESSALTKHKIIHTGEKPYKCEKCGKAFNQSSILTNHKKIHTITPVIPLLWEAEAGGSRGQEMETILANTVKPLLYXKIQKISRAWWRAPVVPAMREAEAGEWREPGRRSLQ

SEQ ID NO: 1344 - protein, 605 aa, Homo Sapiens
  misc_feature (573)..(573): Xaa can be any naturally occurring amino acid
MAAPRPSPAISVSVSAPAFYAPQKKFGPVVAPKPKVNPFRPGDSEPPPAPGAQRAQMGRVGEIPPPPPEDFPLPPPPLAGDGDDAEGALGGAFPPPPPPIEESFPPAPLEEEIFPSPPPPPEEEGGPEAPIPPPPQPREKVSSIDLEIDSLSSLLDDMTKNDPFKARVSSGYVPPPVATPFSSKSSTKPAAGGTAPLPPWKSPSSSQPLPQVPAPAQSQTQFHVQPQPQPKPQVQLHVQSQTQPVSLANTQPRGPPASSPAPAPKFSPVTPKFTPVASKFSPGAPGGSGSQPNQKLGHPEALSAGTGSPQPPSFTYAQQREKPRVQEKQHPVPPPAQNQNQVRSPGAPGPLTLKEVEELEQLTQQLMQDMEHPQRQNVAVNELCGRCHQPLARAQPAVRALGQLFHIACFTCHQCAQQLQGQQFYSLEGAPYCEGCYTDTLEKCNTCGEPITDRMLRATGKAYHPHCFTCVVCARPLEGTSFIVDQANRPHCVPDYHKQYAPRCSVCSEPIMPEPGRDETVRVVALDKNFHMKCYKCEDCGKPLSIEADDNGCFPLDGHVLCRKCHTARAQTXVRTGPLQTAVHAPLWTTHTETTCPHLSYCFDV

SEQ ID NO: 1345 - protein, 1556 aa, Homo Sapiens
  misc_feature (1546)..(1546): Xaa can be any naturally occurring amino acid
MLEKFCNSTFWNSSFLDSPEADLPLCFEQTVLVWIPLGFLWLLAPWQLLHVYKSRTKRSSTTKLYLAKQVFVGFLLILAAIELALVLTEDSGQATVPAVRYTNPSLYLGTWLLVLLIQYSRQWCVQKNSWFLSLFWILSILCGTFQFQTLIRTLLQGDNSNLAYSCLFFISYGFQILILIFSAFSENNESSNNPSSIASFLSSITYSWYDSIILKGYKRPLTLEDVWEVDEEMKTKTLVSKFETHMKRELQKARRALQRRQEKSSQQNSGARLPGLNKNQSQSQDALVLEDVEKKKKKSGTKKDVPKSWLMKALFKTFYMVLLKSFLLKLVNDIFTFVSPQLLKLLISFASDRDTYLWIGYLCAILLFTAALIQSFCLQCYFQLCFKLGVKVRTAIMASVYKKALTLSNLARKEYTVGETVNLMSVDAQKLMDVTNFMHMLWSSVLQIVLSIFFLWRELGPSVLAGVGVMVLVIPINAILSTKSKTIQVKNMKNKDKRLKIMNEILSGIKILKYFAWEPSFRDQVQNLRKKELKNLLAFSQLQCVVIFVFQLTPVLVSVVTFSVYVLVDSNNILDAQKAFTSITLFNILRFPLSMLPMMISSMLQASVSTERLEKYLGGDDLDTSAIRHDCNFDKAMQFSEASFTWEHDSEATVRDVNLDIMAGQLVAVIGPVGSGKSSLISAMLGEMENVHGHITIKGTTAYVPQQSWIQNGTIKDNILFGTEFNEKRYQQVLEACALLPDLEMLPGGDLAEIGEKGINLSGGQKQRISLARATYQNLDIYLLDDPLSAVDAHVGKHIFNKVLGPNGLLKGKTRLLVTHSMHFLPQVDEIVVLGNGTIVEKGSYSALLAKKGEFAKNLKTFLRHTGPEEEATVHDGSEEEDDDYGLISSVEEIPEDAASITMRRENSFRRTLSRSSRSNGRHLKSLRNSLKTRNVNSLKEDEELVKGQKLIKKEFIETGKVKFSIYLEYLQAIGLFSIFFIILAFVMNSVAFIGSNLWLSAWTSDSKIFNSTDYPASQRDMRVGVYGALGLAQGIFVFIAHFWSAFGFVHASNILHKQLLNNILRAPMRFFDTTPTGRIVNRFAGDISTVDDTLPQSLRSWITCFLGIISTLVMICMATPVFTIIVIPLGIIYVSVQMFYVSTSRQLRRLDSVTRSPIYSHFSETVSGLPVIRAFEHQQRFLKHNEVRIDTNQKCVFSWITSNRWLAIRLELVGNLTVFFSALMMVIYRDTLSGDTVGFVLSNALNITQTLNWLVRMTSEIETNIVAVERITEYTKVENEAPWVTDKRPPPDWPSKGKIQFNNYQVRYRPELDLVLRGITCDIGSMEKIGVVGRTGAGKSSLTNCLFRILEAAGGQIIIDGVDIASIGLHDLREKLTIIPQDPILFSGSLRMNLDPFNNYSDEEIWKALELAHLKSFVASLQLGLSHEVTEAGGNLSIGQRQLLCLGRALLRKSKILVLDEATAAVDLETDNLIQTTIQNEFAHCTVITIAHRLHTIMDSDKVMVLDNGKIIECGSPEELLQIPGPFYFMAKEAGIENVNSTKFXQKAPWVRKGL

SEQ ID NO: 1346 - protein, 1546 aa, Homo Sapiens
  misc_feature (1528)..(1528): Xaa can be any naturally occurring amino acid
MDALCGSGELGSKFWDSNLSVHTENPDLTPCFQNSLLAWVPCIYLWVALPCYLLYLRHHCRGYIILSHLSKLKMVLGVLLWCVSWADLFYSFHGLVHGRAPAPVFFVTPLVVGVTMLLATLLIQYERLQGVQSSGVLIIFWFLCVVCAIVPFRSKILLAKAEGEISDPFRFTTFYIHFALVLSALILACFREKPPFFSAKNVDPNPYPETSAGFLSRLFFWWFTKMAIYGYRHPLEEKDLWSLKEEDRSQMVVQQLLEAWRKQEKQTARHKASAAPGKNASGEDEVLLGARPRPRKPSFLKALLATFGSSFLISACFKLIQDLLSFINPQLLSILIRFISNPMAPSWWGFLVAGLMFLCSMMQSLILQHYYHYIFVTGVKFRTGIMGVIYRKALVITNSVKRASTVGEIVNLMSVDAQRFMDLAPFLNLLWSAPLQIILAIYFLWQNLGPSVLAGVAFMVLLIPLNGAVAVKMRAFQVKQMKLKDSRIKLMSEILNGIKVLKLYAWEPSFLKQVEGIRQGELQLLRTAAYLHTTTTFTWMCSPFLVTLITLWVYVYVDPNNVLDAEKAFVSVSLFNILRLPLNMLPQLISNLTQASVSLKRIQQFLSQEELDPQSVERKTISPGYAITIHSGTFTWAQDLPPTLHSLDIQVPKGALVAVVGPVGCGKSSLVSALLGEMEKLEGKVHMKGSVAYVPQQAWIQNCTLQENVLFGKALNPKRYQQTLEACALLADLEMLPGGDQTEIGEKGINLSGGQRQRVSLARAVYSDADIFLLDDPLSAVDSHVAKHIFDHVIGPEGVLAGKTRVLVTHGISFLPQTDFIIVLADGQVSEMGPYPALLQRNGSFANFLCNYAPDEDQGHLEDSWTALEGAEDKEALLIEDTLSNHTDLTDNDPVTYVVQKQFMRQLSALSSDGEGQGRPVPRRHLGPSEKVQVTEAKADGALTQEEKAAIGTVELSVFWDYAKAVGLCTTLAICLLYVGQSAAAIGANVWLSAWTNDAMADSRQNNTSLRLGVYAALGILQGFLVMLAAMAMAAGGIQAARVLHQALLHNKIRSPQSFFDTTPSGRILNCFSKDIYVVDEVLAPVILMLLNSFFNAISTLVVIMASTPLFTVVILPLAVLYTLVQRFYAATSRQLKRLESVSRSPIYSHFSETVTGASVIRAYNRSRDFEIISDTKVDANQRSCYPYIISNRWLSIGVEFVGNCVVLFAALFAVIGRSSLNPGLVGLSVSYSLQVTFALNWMIRMMSDLESNIVAVERVKEYSKTETEAPWVVEGSRPPEGWPPRGEVEFRNYSVRYRPGLDLVLRDLSLHVHGGEKVGIVGRTGAGKSSMTLCLFRILEAAKGEIRIDGLNVADIGLHDLRSQLTIIPQDPILFSGTLRMNLDPFGSYSEEDIWWALELSHLHTFVSSQPAGLDFQCSEGGENLSVGQRQLVCLARALLRKSRILVLDEATAAIDLETDNLIQATIRTQFDTCTVLTIAHRLNTIMDYTRVLVLDKGVVAEFDSPANLIAARGIFYGMARDAGLAXNIFLRFPPGLSWFSSGRK

SEQ ID NO: 1347 - protein, 393 aa, Homo Sapiens
  misc_feature (387)..(387): Xaa can be any naturally occurring amino acid
MRAAPLLLARAASLSLGFLFLLFFWLDRSVLAKELKFVTLVFRHGDRSPIDTFPTDPIKESSWPQGFGQLTQLGMEQHYELGEYIRKRYRKFLNESYKHEQVYIRSTDVDRTLMSAMTNLAALFPPEGVSIWNPILLWQPIPVHTVPLSEDQLLYLPFRNCPRFQELESETLKSEEFQKRLHPYKDFIATLGKLSGLHGQDLFGIWSKVYDPLYCESVHNFTLPSWATEDTMTKLRELSELSLLSLYGIHKQKEKSRLQGGVLVNEILNHMKRATQIPSYKKLIMYSAHDTTVSGLQMALDVYNGLLPPYASCHLTELYFEKGEYFVEMYYRNETQHEPYPLMLPGCSPSCPLERFAELVGPVIPQDWSTECMTTNSHQGTEDSTDXCAQRSL

SEQ ID NO: 1348 - protein, 218 aa, Homo Sapiens
  misc_feature (186)..(186): Xaa can be any naturally occurring amino acid
MKLVSVALMYLGSLAFLGADTARLDVASEFRKKWNKWALSRGKRELRMSSSYPTGLADVKAGPAQTLIRPQDMKGASRSPEDSSPDAARIRVKRYRQSMNNFQGLRSFGCRFGTCTVQKLAHQIYQFTDKDKDNVAPRSKISPQGYGRRRRRSLPEAGPGRTLVSSKPQAHGAPAPPSGSAPHFLXDLGAHGTRNSRASIPLVPPGTKDFPSGVGTGL

SEQ ID NO: 1349 - protein, 625 aa, Homo Sapiens
  misc_feature (610)..(610): Xaa can be any naturally occurring amino acid
MKWVESIFLIFLLNFTESRTLHRNEYGIASILDSYQCTAEISLADLATIFFAQFVQEATYKEVSKMVKDALTAIEKPTGDEQSSGCLENQLPAFLEELCHEKEILEKYGHSDCCSQSEEGRHNCFLAHKKPTPASIPLFQVPEPVTSCEAYEEDRETFMNKFIYEIARRHPFLYAPTILLWAARYDKIIPSCCKAENAVECFQTKAATVTKELRESSLLNQHACAVMKNFGTRTFQAITVTKLSQKFTKVNFTEIQKLVLDVAHVHEHCCRGDVLDCLQDGEKIMSYICSQQDTLSNKITECCKLTTLERGQCIIHAENDEKPEGLSPNLNRFLGDRDFNQFSSGEKNIFLASFVHEYSRRHPQLAVSVILRVAKGYQELLEKCFQTENPLECQDKGEEELQKYIQESQALAKRSCGLFQKLGEYYLQNAFLVAYTKKAPQLTSSELMAITRKMAATAATCCQLSEDKLLACGEGAADIIIGHLCIRHEMTPVNPGVGQCCTSSYANRRPCFSSLVVDETYVPPAFSDDKFIFHKDLCQAQGVALQTMKQEFLINLVKQKPQITEEQLEAVIADFSGLLEKCCQGQEQEVCFAEEGQKLISKTRAALGVXITSGEEKTKRVFHSV

SEQ ID NO: 1350 - protein, 627 aa, Homo Sapiens
  misc_feature (610)..(610): Xaa can be any naturally occurring amino acid
MKWVTFISLLFLFSSAYSRGVFRRDAHKSEVAHRFKDLGEENFKALVLIAFAQYLQQCPFEDHVKLVNEVTEFAKTCVADESAENCDKSLHTLFGDKLCTVATLRETYGEMADCCAKQEPERNECFLQHKDDNPNLPRLVRPEVDVMCTAFHDNEETFLKKYLYEIARRHPYFYAPELLFFAKRYKAAFTECCQAADKAACLLPKLDELRDEGKASSAKQRLKCASLQKFGERAFKAWAVARLSQRFPKAEFAEVSKLVTDLTKVHTECCHGDLLECADDRADLAKYICENQDSISSKLKECCEKPLLEKSHCIAEVENDEMPADLPSLAADFVESKDVCKNYAEAKDVFLGMFLYEYARRHPDYSVVLLLRLAKTYETTLEKCCAAADPHECYAKVFDEFKPLVEEPQNLIKQNCELFEQLGEYKFQNALLVRYTKKVPQVSTPTLVEVSRNLGKVGSKCCKHPEAKRMPCAEDYLSVVLNQLCVLHEKTPVSDRVTKCCTESLVNRRPCFSALEVDETYVPKEFNAETFTFHADICTLSEKERQIKKQTALVELVKHKPKATKEQLKAVMDDFAAFVEKCCKADDKETCFAEEGKKLVAASQAALGLXHLHLKASQPTMRIRERK

SEQ ID NO: 1351 - protein, 412 aa, Homo Sapiens
  misc_feature (365)..(365): Xaa can be any naturally occurring amino acid
MPYQYPALTPEQKKELSDIAHRIVAPGKGILAADESTGSIAKRLQSIGTENTEENRRFYRQLLLTADDRVNPCIGGVILFHETLYQKADDGRPFPQVIKSKGGVVGIKVDKGVVPLAGTNGETTTQGLDGLSERCAQYKKDGADFAKWRCVLKIGEHTPSALAIMENANVLARYASICQQNGIVPIVEPEILPDGDHDLKRCQYVTEKVLAAVYKALSDHHIYLEGTLLKPNMVTPGHACTQKFSHEEIAMATVTALRRTVPPAVTGITFLSGGQSEEEASINLNAINKCPLLKPWALTFSYGRALQASALKAWGGKKENLKAAQEEYVKRALANSLACQGKYTPSGQAGAAASESLFVSNHAYXAEVFPGCPQHSRPCPLPLLKRRPPPRGSRLACPRSFFPRDSGVWCRL

SEQ ID NO: 1352 - protein, 535 aa, Homo Sapiens
  misc_feature (525)..(525): Xaa can be any naturally occurring amino acid
MISPFLVLAIGTCLTNSLVPEKEKDPKYWRDQAQETLKYALELQKLNTNVAKNVIMFLGDGMGVSTVTAARILKGQLHHNPGEETRLEMDKFPFVALSKTYNTNAQVPDSAGTATAYLCGVKANEGTVGVSAATERSRCNTTQGNEVTSILRWAKDAGKSVGIVTTTRVNHATPSAAYAHSADRDWYSDNEMPPEALSQGCKDIAYQLMHNIRDIDVIMGGGRKYMYPKNKTDVEYESDEKARGTRLDGLDLVDTWKSFKPRYKHSHFIWNRTELLTLDPHNVDYLLGLFEPGDMQYELNRNNVTDPSLSEMVVVAIQILRKNPKGFFLLVEGGRIDHGHHEGKAKQALHEAVEMDRAIGQAGSLTSSEDTLTVVTADHSHVFTFGGYTPRGNSIFGLAPMLSDTDKKPFTAILYGNGPGYKVVGGERENVSMVDYAHNNYQAQSAVPLRHETHGGEDVAVFSKGPMAHLLHGVHEQNYVPHVMAYAACIGANLGHCAPASSAGSLAAGPLLLALALYPLSVLFXGPRARAPTSP

SEQ ID NO: 1353 - protein, 591 aa, Homo Sapiens
  misc_feature (536)..(536): Xaa can be any naturally occurring amino acid
MLGPCMLLLLLLLGLRLQLSLGIIPVEEENPDFWNREAAEALGAAKKLQPAQTAAKNLIIFLGDGMGVSTVTAARILKGQKKDKLGPEIPLAMDRFPYVALSKTYNVDKHVPDSGATATAYLCGVKGNFQTIGLSAAARFNQCNTTRGNEVISVMNRAKKAGKSVGVVTTTRVQHASPAGTYAHTVNRNWYSDADVPASARQEGCQDIATQLISNMDIDVILGGGRKYMFRMGTPDPEYPDDYSQGGTRLDGKNLVQEWLAKRQGARYVWNRTELMQASLDPSVTHLMGLFEPGDMKYEIHRDSTLDPSLMEMTEAALRLLSRNPRGFFLFVEGGRIDHGHHESRAYRALTETIMFDDAIERAGQLTSEEDTLSLVTADHSHVFSFGGYPLRGSSIFGLAPGKARDRKAYTVLLYGNGPGYVLKDGARPDVTESESGSPEYRQQSAVPLDEETHAGEDVAVFARGPQAHLVHGVQEQTFIAHVMAFAACLEPYTACDLAPPAGTTDAAHPGRSVVPALLPLLAGTLLLLETATAPXVSRPWGSCFPIPEFSCSPPPVVLPGLQPESSSPESLYRGPAMEPSPPRALWGLSP

SEQ ID NO: 1354 - protein, 366 aa, Homo Sapiens
  misc_feature (340)..(340): Xaa can be any naturally occurring amino acid
MSTVHEILCKLSLEGDHSTPPSAYGSVKAYTNFDAERDALNIETAIKTKGVDEVTIVNILTNRSNAQRQDIAFAYQRRTKKELASALKSALSGHLETVILGLLKTPAQYDASELKASMKGLGTDEDSLIEIICSRTNQELQEINRVYKEMYKTDLEKDIISDTSGDFRKLMVALAKGRRAEDGSVIDYELIDQDARDLYDAGVKRKGTDVPKWISIMTERSVPHLQKVFDRYKSYSPYDMLESIRKEVKGDLENAFLNLVQCIQNKPLYFADRLYDSMKGKGTRDKVLIRIMVSRSEVDMLKIRSEFKRKYGKSLYYYIQQDTKGDYQKALLYLCGGDDXSPTRPERPEMVLTMLPANRSRKPACE

SEQ ID NO: 1355 - protein, 813 aa, Homo Sapiens
  misc_feature (764)..(764): Xaa can be any naturally occurring amino acid
MNQKTILVLLILAVITIFALVCVLLVGRGGDGGEPSQLPHCPSVSPSAQPWTHPGQSQLFADLSREELTAVMRFLTQRLGPGLVDAAQARPSDNCVFSVELQLPPKAAALAHLDRGSPPPAREALAIVFFGRQPQPNVSELVVGPLPHPSYMRDVTVERHGGPLPYHRRPVLFQEYLDIDQMIFNRELPQASGLLHHCCFYKHRGRNLVTMTTAPRGLQSGDRATWFGLYYNISGAGFFLHHVGLELLVNHKALDPARWTIQKVFYQGRYYDSLAQLEAQFEAGLVNVVLIPDNGTGGSWSLKSPVPPGPAPPLQFYPQGPRFSVQGSRVASSLWTFSFGLGAFSGPRIFDVRFQGERLVYEISLQEALAIYGGNSPAAMTTRYVDGGFGMGKYTTPLTRGVDCPYLATYVDWHFLLESQAPKTIRDAFCVFEQNQGLPLRRHHSDLYSHYFGGLAETVLVVRSMSTLLNYDYVWDTVFHPSGAIEIRFYATGYISSAFLFGATGKYGNQVSEHTLGTVHTHSAHFKVDLDVAGLENWVWAEDMVFVPMAVPWSPEHQLQRLQVTRKLLEMEEQAAFLVGSATPRYLYLASNHSNKWGHPRGYRIQMLSFAGEPLPQNSSMARGFSWERYQLAVTQRKEEEPSSSSVFNQNDPWAPTVDFSDFINNETIAGKDLVAWVTAGFLHIPHAEDIPNTVTVGNGVGFFLRPYNFFDEDPSFYSADSIYFRGDQDAGACEVNPLACLPQAAACAPDLPAFSHGGFSHNXAVLGWGMWPRAPGPGCEGWGAAGHWAGSLVPSFLCQDSLSSTTLPRIRL

SEQ ID NO: 1356 - protein, 280 aa, Homo Sapiens
  misc_feature (268)..(268): Xaa can be any naturally occurring amino acid
MKAAVLTLAVLFLTGSQARHFWQQDEPPQSPWDRVKDLATVYVDVLKDSGRDYVSQFEGSALGKQLNLKLLDNWDSVTSTFSKLREQLGPVTQEFWDNLEKETEGLRQEMSKDLEEVKAKVQPYLDDFQKKWQEEMELYRQKVEPLRAELQEGARQKLHELQEKLSPLGEEMRDRARAHVDALRTHLAPYSDELRQRLAARLEALKENGGARLAEYHAKATEHLSTLSEKAKPALEDLRQGLLPVLESFKVSFLSALEEYTKKLNTQXGARRRPPSRCSE

SEQ ID NO: 1357 - protein, 121 aa, Homo Sapiens
  misc_feature (101)..(101): Xaa can be any naturally occurring amino acid
MKLLAATVLLLTICSLEGALVRRQAKEPCVESLVSQYFQTVTDYGKDLMEKVKSPELQAEAKSYFEKSKEQLTPLIKKAGTELVNFLSYFVELGTQPATQXSVQTIVFQPQLASRTPTGQS

SEQ ID NO: 1358 - protein, 88 aa, Homo Sapiens
  misc_feature (84)..(84): Xaa can be any naturally occurring amino acid
MRLFLSLPVLVVVLSIVLEGPAPAQGTPDVSSALDKLKEFGNTLEDKARELISRIKQSELSAKMREWFSETFQKVKEKLKIDSXGPEG

SEQ ID NO: 1359 - protein, 154 aa, Homo Sapiens
  misc_feature (100)..(100): Xaa can be any naturally occurring amino acid
MQPRVLLVVALLALLASARASEAEDASLLSFMQGYMKHATKTAKDALSSVQESQVAQQARGWVTDGFSSLKDYWSTVKDKFSEFWDLDPEVRPTSAVAAXDLNTPSPPAYPSCELLGSCNLQGCPCRLLKRDSILSALLPHLMPGPPPGMLASQ

SEQ ID NO: 1360 - protein, 226 aa, Homo Sapiens
  misc_feature (190)..(190): Xaa can be any naturally occurring amino acid
MVMLLLLLSALAGLFGAAEGQAFHLGKCPNPPVQENFDVNKYLGRWYEIEKIPTTFENGRCIQANYSLMENGKIKVLNQELRADGTVNQIEGEATPVNLTEPAKLEVKFSWFMPSAPYWILATDYENYALVYSCTCIIQLFHVDFAWILARNPNLPPETVDSLKNILTSNNIDVKKMTVTDQVNCPKLSXPGSTGRLHPLHVTSASLSPTPPPPHKDKPINHDKGS

SEQ ID NO: 1361 - protein, 355 aa, Homo Sapiens
  misc_feature (318)..(318): Xaa can be any naturally occurring amino acid
MKVLWAALLVTFLAGCQAKVEQAVETEPEPELRQQTEWQSGQRWELALGRFWDYLRWVQTLSEQVQEELLSSQVTQELRALMDETMKELKAYKSELEEQLTPVAEETRARLSKELQAAQARLGADMEDVCGRLVQYRGEVQAMLGQSTEELRVRLASHLRKLRKRLLRDADDLQKRLAVYQAGAREGAERGLSAIRERLGPLVEQGRVRAATVGSLAGQPLQERAQAWGERLRARMEEMGSRTRDRLDEVKEQVAEVRAKLEEQAQQIRLQAEAFQARLKSWFEPLVEDMQRQWAGLVEKVQAAVGTSAAPVPSDNHXTPKPAAMRPHATPCLLPPRSLQRETLSPPQPSSWGGP

SEQ ID NO: 1362 - protein, 373 aa, Homo Sapiens
  misc_feature (355)..(355): Xaa can be any naturally occurring amino acid
MSLRGSLSRLLQTRVHSILKKSVHSVAVIGAPFSQGQKRKGVEHGPAAIREAGLMKRLSSLGCHLKDFGDLSFTPVPKDDLYNNLIVNPRSVGLANQELAEVVSRAVSDGYSCVTLGGDHSLAIGTISGHARHCPDLCVVWVDAHADINTPLTTSSGNLHGQPVSFLLRELQDKVPQLPGFSWIKPCISSASIVYIGLRDVDPPEHFILKNYDIQYFSMRDIDRLGIQKVMERTFDLLIGKRQRPIHLSFDIDAFDPTLAPATGTPVVGGLTYREGMYIAEEIHNTGLLSALDLVEVNPQLATSEEEAKTTANLAVDVIASSFGQTREGGHIVYDQLPTPSSPDESENQARVRIXETLCTDMFHNRHSRIMRH

SEQ ID NO: 1363 - protein, 711 aa, Homo Sapiens
  misc_feature (707)..(707): Xaa can be any naturally occurring amino acid
MASPADSCIQFTRHASDVLLNLNRLRSRDILTDVVIVVSREQFRAHKTVLMACSGLFYSIFTDQLKCNLSVINLDPEINPEGFCILLDFMYTSRLNLREGNIMAVMATAMYLQMEHVVDTCRKFIKASEAEMVSAIKPPREEFLNSRMLMPQDIMAYRGREVVENNLPLRSAPGCESRAFAPSLYSGLSTPPASYSMYSHLPVSSLLFSDEEFRDVRMPVANPFPKERALPCDSARPVPGEYSRPTLEVSPNVCHSNIYSPKETIPEEARSDMHYSVAEGLKPAAPSARNAPYFPCDKASKEEERPSSEDEIALHFEPPNAPLNRKGLVSPQSPQKSDCQPNSPTESCSSKNACILQASGSPPAKSPTDPKACNWKKYKFIVLNSLNQNAKPEGPEQAELGRLSPRAYTAPPACQPPMEPENLDLQSPTKLSASGEDSTIPQASRLNNIVNRSMTGSPRSSSESHSPLYMHPPKCTSCGSQSPQHAEMCLHTAGPTFPEEMGETQSEYSDSSCENGAFFCNECDCRFSEEASLKRHTLQTHSDKPYKCDRCQASFRYKGNLASHKTVHTGEKPYRCNICGAQFNRPANLKTHTRIHSGEKPYKCETCGARFVQVAHLRAHVLIHTGEKPYPCEICGTRFRHLQTLKSHLRIHTGEKPYHCEKCNLHFRHKSQLRLHLRQKHGAITNTKVQYRVSATDLPPELPKACXSMEC

SEQ ID NO: 1364 - protein, 579 aa, Homo Sapiens
  misc_feature (506)..(506): Xaa can be any naturally occurring amino acid
MGLVSSKKPDKEKPIKEKDKGQWSPLKVSAQDKDAPPLPPLVVFNHLTPPPPDEHLDEDKHFVVALYDYTAMNDRDLQMLKGEKLQVLKGTGDWWLARSLVTGREGYVPSNFVARVESLEMERWFFRSQGRKEAERQLLAPINKAGSFLIRESETNKGAFSLSVKDVTTQGELIKHYKIRCLDEGGYYISPRITFPSLQALVQHYSKKGDGLCQRLTLPCVRPAPQNPWAQDEWEIPRQSLRLVRKLGSGQFGEVWMGYYKNNMKVAIKTLKEGTMSPEAFLGEANVMKALQHERLVRLYAVVTKEPIYIVTEYMARGCLLDFLKTDEGSRLSLPRLIDMSAQIAEGMAYIERMNSIHRDLRAANILVSEALCCKIADFGLARIIDSEYTAQEGAKFPIKWTAPEAIHFGVFTIKADVWSFGVLLMEVVTYGRVPYPGMSNPEVIRNLERGYRMPRPDTCPPELYRGVIAECWRSRPEERPTFEFLQSVLEDFYTATERQYELQPXPAAPACAPCPPLRGRPRLPCHPRRAAKAGCRLCPFLRPGIQWAEAASQGVPGRTPSPTAPPGELRGLSVPLHL

SEQ ID NO: 1365 - protein, 939 aa, Homo Sapiens
  misc_feature (935)..(935): Xaa can be any naturally occurring amino acid
MARRSVLYFILLNALINKGQACFCDHYAWTQWTSCSKTCNSGTQSRHRQIVVDKYYQENFCEQICSKQETRECNWQRCPINCLLGDFGPWSDCDPCIEKQSKVRSVLRPSQFGGQPCTEPLVAFQPCIPSKLCKIEEADCKNKFRCDSGRCIARKLECNGENDCGDNSDERDCGRTKAVCTRKYNPIPSVQLMGNGFHFLAGEPRGEVLDNSFTGGICKTVKSSRTSNPYRVPANLENVGFEVQTAEDDLKTDFYKDLTSLGHNENQQGSFSSQGGSSFSVPIFYSSKRSENINHNSAFKQAIQASHKKDSSFIRIHKVMKVLNFTTKAKDLHLSDVFLKALNHLPLEYNSALYSRIFDDFGTHYFTSGSLGGVYDLLYQFSSEELKNSGLTEEEAKHCVRIETKKRVLFAKKTKVEHRCTTNKLSEKHEGSFIQGAEKSISLIRGGRSEYGAALAWEKGSSGLEEKTFSEWLESVKENPAVIDFELAPIVDLVRNIPCAVTKRNNLRKALQEYAAKFDPCQCAPCPNNGRPTLSGTECLCVCQSGTYGENCEKQSPDYKSNAVDGQWGCWSSWSTCDATYKRSRTRECNNPAPQRGGKRCEGEKRQEEDCTFSIMENNGQPCINDDEEMKEVDLPEIEADSGCPQPVPPENGFIRNEKQLYLVGEDVEISCLTGFETVGYQYFRCLPDGTWRQGDVECQRTECIKPVVQEVLTITPFQRLYRIGESIELTCPKGFVVAGPSRYTCQGNSWTPPISNSLTCEKDTLTKLKGHCQLGQKQSGSECICMSPEEDCSHHSEDLCVFDTDSNDYFTSPACKFLAEKCLNNQQLHFLHIGSCQDGRQLEWGLERTRLSSNSTKKESCGYDTCYDWEKCSASTSKCVCLLPPQCFKGGNQLYCVKMGSSTSEKTLNICEVGTIRCANRKMEILHPGKCLAXHNYC

SEQ ID NO: 1366 - protein, 861 aa, Homo Sapiens
  misc_feature (844)..(844): Xaa can be any naturally occurring amino acid
MKVISLFILVGFIGEFQSFSSASSPVNCQWDFYAPWSECNGCTKTQTRRRSVAVYGQYGGQPCVGNAFETQSCEPTRGCPTEEGCGERFRCFSGQCISKSLVCNGDSDCDEDSADEDRCEDSERRPSCDIDKPPPNIELTGNGYNELTGQFRNRVINTKSFGGQCRKVFSGDGKDFYRLSGNVLSYTFQVKINNDFNYEFYNSTWSYVKHTSTEHTSSSRKRSFFRSSSSSSRSYTSHTNEIHKGKSYQLLVVENTVEVAQFINNNPEFLQLAEPFWKELSHLPSLYDYSAYRRLIDQYGTHYLQSGSLGGEYRVLFYVDSEKLKQNDFNSVEEKKCKSSGWHFVVKFSSHGCKELENALKAASGTQNNVLRGEPFIRGGGAGFISGLSYLELDNPAGNKRRYSAWAESVTNLPQVIKQKLTPLYELVKEVPCASVKKLYLKWALEEYLDEFDPCHCRPCQNGGLATVEGTHCLCHCKPYTFGAACEQGVLVGNQAGGVDGGWSCWSSWSPCVQGKKTRSRECNNPPPSGGGRSCVGETTESTQCEDEELEHLRLLEPHCFPLSLVPTEFCPSPPALKDGFVQDEGTMFPVGKNVVYTCNEGYSLIGNPVARCGEDLRWLVGEMHCQKIACVLPVLMDGIQSHPQKPFYTVGEKVTVSCSGGMSLEGPSAFLCGSSLKWSPEMKNARCVQKENPLTQAVPKCQRWEKLQNSRCVCKMPYECGPSLDVCAQDERSKRILPLTVCKMHVLHCQGRNYTLTGRDSCTLPASAEKACGACPLWGKCDAESSKCVCREASECEEEGFSICVEVNGKEQTMSECEAGALRCRGQSISVTSIRPCAAETQXAPGGPGQLAWNPAGSWG

SEQ ID NO: 1367 - protein, 132 aa, Homo Sapiens
  misc_feature (129)..(129): Xaa can be any naturally occurring amino acid
MGFQKFSPFLALSILVLLQAGSLHAAPFRSALESSPADPATLSEDEARLLLAALVQDYVQMKASELEQEQEREGSRIIAQKRACDTATCVTHRLAGLLSRSGGVVKNNFVPTNVGSKAFGRRRRDLQAXAAE

SEQ ID NO: 1368 - protein, 148 aa, Homo Sapiens
  misc_feature (142)..(142): Xaa can be any naturally occurring amino acid
MGFQKFSPFLALSILVLLQAGSLHAAPFRSALESSPADPATLSEDEARLLLAALVQDYVQMKASELEQEQEREGSSLDSPRSKRCGNLSTCMLGTYTQDFNKFHTFPQTAIGVGAPGKKRDMSSDLERDHRPHVSMPQNANXTPPFPS

SEQ ID NO: 1369 - protein, 426 aa, Homo Sapiens
  misc_feature (418)..(418): Xaa can be any naturally occurring amino acid
MLLSVPLLLGLLGLAVAEPAVYFKEQFLDGDGWTSRWIESKHKSDFGKFVLSSGKFYGDEEKDKGLQTSQDARFYALSASFEPFSNKGQTLVVQFTVKHEQNIDCGGGYVKLFPNSLDQTDMHGDSEYNIMFGPDICGPGTKKVHVIFNYKGKNVLINKDIRCKDDEFTHLYTLIVRPDNTYEVKIDNSQVESGSLEDDWDFLPPKKIKDPDASKPEDWDERAKIDDPTDSKPEDWDKPEHIPDPDAKKPEDWDEEMDGEWEPPVIQNPEYKGEWKPRQIDNPDYKGTWIHPEIDNPEYSPDPSIYAYDNFGVLGLDLWQVKSGTIFDNFLITNDEAYAEEFGNETWGVTKAAEKQMKDKQDEEQRLKEEEEDKKRKEEEEAEDKEDDEDKDEDEEDEEDKEEDEEEDVPGQAKDELXRGLPPGLD

SEQ ID NO: 1370 - protein, 537 aa, Homo Sapiens
  misc_feature (522)..(522): Xaa can be any naturally occurring amino acid
MKSQGQHWYSSSDKNCKVSFREKLLIIDSNLGVQDVENLKFLCIGLVPNKKLEKSSSASDVFEHLLAEDLLSEEDPFFLAELLYIIRQKKLLQHLNCTKEEVERLLPTRQRVSLFRNLLYELSEGIDSENLKDMIFLLKDSLPKTEMTSLSFLAFLEKQGKIDEDNLTCLEDLCKTVVPKLLRNIEKYKREKAIQIVTPPVDKEAESYQGEEELVSQTDVKTFLEALPQESWQNKHAGSNGNRATNGAPSLVSRGMQGASANTLNSETSTKRAAVYRMNRNHRGLCVIVNNHSFTSLKDRQGTHKDAEILSHVFQWLGFTVHIHNNVTKVEMEMVLQKQKCNPAHADGDCFVFCILTHGRFGAVYSSDEALIPIREIMSHFTALQCPRLAEKPKLFFIQACQGEEIQPSVSIEADALNPEQAPTSLQDSIPAEADFLLGLATVPGYVSFRHVEEGSWYIQSLCNHLKKLVPRMLKFLEKTMEIRGRKRTVWGAKQISATSLPTAISAQTPRPPMRRWSSVSXFFPEASFCLPSSHIA

SEQ ID NO: 1371 - protein, 590 aa, Homo Sapiens
  misc_feature (528)..(528): Xaa can be any naturally occurring amino acid
MADSRDPASDQMQHWKEQRAAQKADVLTTGAGNPVGDKLNVITVGPRGPLLVQDVVFTDEMAHFDRERIPERVVHAKGAGAFGYFEVTHDITKYSKAKVFEHIGKKTPIAVRFSTVAGESGSADTVRDPRGFAVKFYTEDGNWDLVGNNTPIFFIRDPILFPSFIHSQKRNPQTHLKDPDMVWDFWSLRPESLHQVSFLFSDRGIPDGHRHMNGYGSHTFKLVNANGEAVYCKFHYKTDQGIKNLSVEDAARLSQEDPDYGIRDLFNAIATGKYPSWTFYIQVMTFNQAETFPFNPFDLTKVWPHKDYPLIPVGKLVLNRNPVNYFAEVEQIAFDPSNMPPGIEASPDKMLQGRLFAYPDTHRHRLGPNYLHIPVNCPYRARVANYQRDGPMCMQDNQGGAPNYYPNSFGAPEQQPSALEHSIQYSGEVRRFNTANDDNVTQVRAFYVNVLNEEQRKRLCENIAGHLKDAQIFIQKKAVKNFTEVHPDYGSHIQALLDKYNAEKPKNAIHTFVQSGSHLAAREKANLXGRGPAPVQRSLAFIRVTRSSLDEDSPVLDVQMQASGFKIENPTFYSRLCNNFNAISPGENEG

SEQ ID NO: 1372 - protein, 107 aa, Homo Sapiens
  misc_feature (94)..(94): Xaa can be any naturally occurring amino acid
MKISVAAIPFFLLITIALGTKTESSSRGPYHPSECCFTYTTYKIPRQRIMDYYETNSQCSKPGIVFITKRGHSVCTNPSDKWVQDYIKDMKENXVTQKGWRRHSSET

SEQ ID NO: 1373 - protein, 134 aa, Homo Sapiens
  misc_feature (100)..(100): Xaa can be any naturally occurring amino acid
MKVSAALLCLLLIAATFIPQGLAQPDAINAPVTCCYNFTNRKISVQRLASYRRITSSKCPKEAVIFKTIVAKEICADPKQKWVQDSMDHLDKQTQTPKTXTLTPQPKNLQLTYFPLAFPRHPVLFYYNEFCLLM

SEQ ID NO: 1374 - protein, 144 aa, Homo Sapiens
  misc_feature (93)..(93): Xaa can be any naturally occurring amino acid
MQVSTAALAVLLCTMALCNQFSASLAADTPTACCFSYTSRQIPQNFIADYFETSSQCSKPGVIFLTKRSRQVCADPSEEWVQKYVSDLELSAXGVQKLRGPATSVGPVGRSRSLSLGNMRVTSTATSSMDWLLPNSHTVGLFLT

SEQ ID NO: 1375 - protein, 112 aa, Homo Sapiens
  misc_feature (93)..(93): Xaa can be any naturally occurring amino acid
MKLCVTVLSLLMLVAAFCSPALSAPMGSDPPTACCFSYTARKLPRNFVVDYYETSSLCSQPAVVFQTKRSKQVCADPSESWVQEYVYDLELNXAAQRQEVFREGHLSPDASP

SEQ ID NO: 1376 - protein, 112 aa, Homo Sapiens
  misc_feature (93)..(93): Xaa can be any naturally occurring amino acid
MKLCVTVLSLLVLVAAFCSLALSAPMGSDPPTACCFSYTARKLPRNFVVDYYETSSLCSQPAVVFQTKRGKQVCADPSESWVQEYVYDLELNXAAQRQEVFREGHLSLDASP

SEQ ID NO: 1377 - protein, 112 aa, Homo Sapiens
  misc_feature (92)..(92): Xaa can be any naturally occurring amino acid
MKVSAAALAVILIATALCAPASASPYSSDTTPCCFAYIARPLPRAHIKEYFYTSGKCSNPAVVFVTRKNRQVCANPEKKWVREYINSLEMSXDGESLNLNLHKFACFCLLLS

SEQ ID NO: 1378 - protein, 417 aa, Homo Sapiens
  misc_feature (399)..(399): Xaa can be any naturally occurring amino acid
MALLRRPTVSSDLENIDTGVNSKVKSHVTIRRTVLEEIGNRVTTRAAQVAKKAQNTKVPVQPTKTTNVNKQLKPTASVKPVQMEKLAPKGPSPTPEDVSMKEENLCQAFSDALLCKIEDIDNEDWENPQLCSDYVKDIYQYLRQLEVLQSINPHFLDGRDINGRMRAILVDWLVQVHSKFRLLQETLYMCVGIMDRFLQVQPVSRKKLQLVGITALLLASKYEEMFSPNIEDFVYITDNAYTSSQIREMETLILKELKFELGRPLPLHFLRRASKAGEVDVEQHTLAKYLMELTLIDYDMVHYHPSKVAAAASCLSQKVLGQGKWNLKQQYYTGYTENEVLEVMQHMAKNVVKVNENLTKFIAIKNKYASSKLLKISMIPQLNSKAVKDLASPLIGRSXAAVGPGDVCFIVPFFLLV

SEQ ID NO: 1379 - protein, 391 aa, Homo Sapiens
  misc_feature (363)..(363): Xaa can be any naturally occurring amino acid
MGTEATEQVSWGHYSGDEEDAYSAEPLPELCYKADVQAFSRAFQPSVSLTVAALGLAGNGLVLATHLAARRAARSPTSAHLLQLALADLLLALTLPFAAAGALQGWSLGSATCRTISGLYSASFHAGFLFLACISADRYVAIARALPAGPRPSTPGRAHLVSVIVWLLSLLLALPALLFSQDGQREGQRRCRLIFPEGLTQTVKGASAVAQVALGFALPLGVMVACYALLGRTLLAARGPERRRALRVVVALVAAFVVLQLPYSLALLLDTADLLAARERSCPASKRKDVALLVTSGLALARCGLNPVLYAFLGLRFRQDLRRLLRGGSCPSGPQPRRGCPRRPRLSSCSAPTETHSLSWDNXGCESRGGGRLRVVGKGSRWGNTEKEAGT

SEQ ID NO: 1380 - protein, 305 aa, Homo Sapiens
  misc_feature (261)..(261): Xaa can be any naturally occurring amino acid
MARPHPWWLCVLGTLVGLSATPAPKSCPERHYWAQGKLCCQMCEPGTFLVKDCDQHRKAAQCDPCIPGVSFSPDHHTRPHCESCRHCNSGLLVRNCTITANAECACRNGWQCRDKECTECDPLPNPSLTARSSQALSPHPQPTHLPYVSEMLEARTAGHMQTLADFRQLPARTLSTHWPPQRSLCSSDFIRILVIFSGMFLVFTLAGALFLHQRRKYRSNKGESPVEPAEPCRYSCPREEEGSTIPIQEDYRKPEPACSPXASTCGSCTTALASTPTPPTIQGRVRPGSHNCSPILLSGPFPVYT

SEQ ID NO: 1381 - protein, 272 aa, Homo Sapiens
  misc_feature (262)..(262): Xaa can be any naturally occurring amino acid
MIETYNQTSPRSAATGLPISMKIFMYLLTVFLITQMIGSALFAVYLHRRLDKIEDERNLHEDFVFMKTIQRCNTGERSLSLLNCEEIKSQFEGFVKDIMLNKEETKKENSFEMQKGDQNPQIAAHVISEASSKTTSVLQWAEKGYYTMSNNLVTLENGKQLTVKRQGLYYIYAQVTFCSNREASSQAPFIASLCLKSPGRFERILLRAANTHSSAKPCGQQSIHLGGVFELQPGASVFVNVTDPSQVSHGTGFTSFGLLKLXTVSPCRLWWS

SEQ ID NO: 1382 - protein, 376 aa, Homo Sapiens
  misc_feature (362)..(362): Xaa can be any naturally occurring amino acid
MDKFWWHAAWGLCLVPLSLAQIDLNITCRFAGVFHVEKNGRYSISRTEAADLCKAFNSTLPTMAQMEKALSIGFETCRYGFIEGHVVIPRIHPNSICAANNTGVYILTSNTSQYDTYCFNASAPPEEDCTSVTDLPNAFDGPITITIVNRDGTRYVQKGEYRTNPEDIYPSNPTDDDVSSGSSSERSSTSGGYIFYTFSTVHPIPDEDSPWITDSTDRIPATRDQDTFHPSGGSHTTHGSESDGHSHGSQEGGANTTSGPIRTPQIPEWLIILASLLALALILAVCIAVNSRRRCGQKKKLVINSGNGAVEDRKPSGLNGEASKSQEMVHLVNKESSETPDQFMTADETRNLQNVDMKIGVXHLHHYLGKKQPLET

SEQ ID NO: 1383 - protein, 430 aa, Homo Sapiens
  misc_feature (393)..(393): Xaa can be any naturally occurring amino acid
MEPPGRRECPFPSWRFPGLLLAAMVLLLYSFSDACEEPPTFEAMELIGKPKPYYEIGERVDYKCKKGYFYIPPLATHTICDRNHTWLPVSDDACYRETCPYIRDPLNGQAVPANGTYEFGYQMHFICNEGYYLIGEEILYCELKGSVAIWSGKPPICEKVLCTPPPKIKNGKHTFSEVEVFEYLDAVTYSCDPAPGPDPFSLIGESTIYCGDNSVWSRAAPECKVVKCRFPVVENGKQISGFGKKFYYKATVMFECDKGFYLDGSDTIVCDSNSTWDPPVPKCLKVLPPSSTKPPALSHSVSTSSTTKSPASSASGPRPTYKPPVSNYPGYPKPEEGILDSLDVWVIAVIVIAIVVGVAVICVVPYRYLQRRKKKGTYLTDETHREVKFTSLXEGEMRERFAFIIKRKADGGAEYATYQTKSTTPAEQRG

SEQ ID NO: 1384 - protein, 413 aa, Homo Sapiens
  misc_feature (385)..(385): Xaa can be any naturally occurring amino acid
MEPPGRRECPFPSWRFPGLLLAAMVLLLYSFSDACEEPPTFEAMELIGKPKPYYEIGERVDYKCKKGYFYIPPLATHTICDRNHTWLPVSDDACYRETCPYIRDPLNGQAVPANGTYEFGYQMHFICNEGYYLIGEEILYCELKGSVAIWSGKPPICEKVLCTPPPKIKNGKHTFSEVEVFEYLDAVTYSCDPAPGPDPFSLIGESTIYCGDNSVWSRAAPECKVVKCRFPVVENGKQISGFGKKFYYKATVMFECDKGFYLDGSDTIVCDSNSTWDPPVPKCLKVSTSSTTKSPASSASGPRPTYKPPVSNYPGYPKPEEGILDSLDVWVIAVIVIAIVVGVAVICVVPYRYLQRRKKKGKADGGAEYATYQTKSTTPAEQRGXIDSTTWFASSSFDSIKIFNSCYSVVSLS

SEQ ID NO: 1385 - protein, 372 aa, Homo Sapiens
  misc_feature (350)..(350): Xaa can be any naturally occurring amino acid
MEPPGRRECPFPSWRFPGLLLAAMVLLLYSFSDACEEPPTFEAMELIGKPKPYYEIGERVDYKCKKGYFYIPPLATHTICDRNHTWLPVSDDACYRETCPYIRDPLNGQAVPANGTYEFGYQMHFICNEGYYLIGEEILYCELKGSVAIWSGKPPICEKVLCTPPPKIKNGKHTFSEVEVFEYLDAVTYSCDPAPGPDPFSLIGESTIYCGDNSVWSRAAPECKVVKCRFPVVENGKQISGFGKKFYYKATVMFECDKGFYLDGSDTIVCDSNSTWDPPVPKCLKGPRPTYKPPVSNYPGYPKPEEGILDSLDVWVIAVIVIAIGKQMVELNMPLTRLNQPLQQSREAEXIPQPGLPVHLLTLLKSSIVVIL

SEQ ID NO: 1386 - protein, 415 aa, Homo Sapiens
  misc_feature (378)..(378): Xaa can be any naturally occurring amino acid
MEPPGRRECPFPSWRFPGLLLAAMVLLLYSFSDACEEPPTFEAMELIGKPKPYYEIGERVDYKCKKGYFYIPPLATHTICDRNHTWLPVSDDACYRETCPYIRDPLNGQAVPANGTYEFGYQMHFICNEGYYLIGEEILYCELKGSVAIWSGKPPICEKVLCTPPPKIKNGKHTFSEVEVFEYLDAVTYSCDPAPGPDPFSLIGESTIYCGDNSVWSRAAPECKVVKCRFPVVENGKQISGFGKKFYYKATVMFECDKGFYLDGSDTIVCDSNSTWDPPVPKCLKVSTSSTTKSPASSASGPRPTYKPPVSNYPGYPKPEEGILDSLDVWVIAVIVIAIVVGVAVICVVPYRYLQRRKKKGTYLTDETHREVKFTSLXEGEMRERFAFIIKRKADGGAEYATYQTKSTTPAEQRG

SEQ ID NO: 1387 - protein, 400 aa, Homo Sapiens
  misc_feature (363)..(363): Xaa can be any naturally occurring amino acid
MEPPGRRECPFPSWRFPGLLLAAMVLLLYSFSDACEEPPTFEAMELIGKPKPYYEIGERVDYKCKKGYFYIPPLATHTICDRNHTWLPVSDDACYRETCPYIRDPLNGQAVPANGTYEFGYQMHFICNEGYYLIGEEILYCELKGSVAIWSGKPPICEKVLCTPPPKIKNGKHTFSEVEVFEYLDAVTYSCDPAPGPDPFSLIGESTIYCGDNSVWSRAAPECKVVKCRFPVVENGKQISGFGKKFYYKATVMFECDKGFYLDGSDTIVCDSNSTWDPPVPKCLKGPRPTYKPPVSNYPGYPKPEEGILDSLDVWVIAVIVIAIVVGVAVICVVPYRYLQRRKKKGTYLTDETHREVKFTSLXEGEMRERFAFIIKRKADGGAEYATYQTKSTTPAEQRG

SEQ ID NO: 1388 - protein, 398 aa, Homo Sapiens
  misc_feature (370)..(370): Xaa can be any naturally occurring amino acid
MEPPGRRECPFPSWRFPGLLLAAMVLLLYSFSDACEEPPTFEAMELIGKPKPYYEIGERVDYKCKKGYFYIPPLATHTICDRNHTWLPVSDDACYRETCPYIRDPLNGQAVPANGTYEFGYQMHFICNEGYYLIGEEILYCELKGSVAIWSGKPPICEKVLCTPPPKIKNGKHTFSEVEVFEYLDAVTYSCDPAPGPDPFSLIGESTIYCGDNSVWSRAAPECKVVKCRFPVVENGKQISGFGKKFYYKATVMFECDKGFYLDGSDTIVCDSNSTWDPPVPKCLKGPRPTYKPPVSNYPGYPKPEEGILDSLDVWVIAVIVIAIVVGVAVICVVPYRYLQRRKKKGKADGGAEYATYQTKSTTPAEQRGXIDSTTWFASSSFDSIKIFNSCYSVVSLS

SEQ ID NO: 1389 - protein, 428 aa, Homo Sapiens
  misc_feature (400)..(400): Xaa can be any naturally occurring amino acid
MEPPGRRECPFPSWRFPGLLLAAMVLLLYSFSDACEEPPTFEAMELIGKPKPYYEIGERVDYKCKKGYFYIPPLATHTICDRNHTWLPVSDDACYRETCPYIRDPLNGQAVPANGTYEFGYQMHFICNEGYYLIGEEILYCELKGSVAIWSGKPPICEKVLCTPPPKIKNGKHTFSEVEVFEYLDAVTYSCDPAPGPDPFSLIGESTIYCGDNSVWSRAAPECKVVKCRFPVVENGKQISGFGKKFYYKATVMFECDKGFYLDGSDTIVCDSNSTWDPPVPKCLKVLPPSSTKPPALSHSVSTSSTTKSPASSASGPRPTYKPPVSNYPGYPKPEEGILDSLDVWVIAVIVIAIVVGVAVICVVPYRYLQRRKKKGKADGGAEYATYQTKSTTPAEQRGXIDSTTWFASSSFDSIKIFNSCYSVVSLS

SEQ ID NO: 1390 - protein, 317 aa, Homo Sapiens
  misc_feature (268)..(268): Xaa can be any naturally occurring amino acid
MGSACIKVTKYFLFLFNLIFFILGAVILGFGVWILADKSSFISVLQTSSSSLRMGAYVFIGVGAVTMLMGFLGCIGAVNEVRCLLGLYFAFLLLILIAQVTAGALFYFNMGKLKQEMGGIVTELIRDYNSSREDSLQDAWDYVQAQVKCCGWVSFYNWTDNAELMNRPEVTYPCSCEVKGEEDNSLSVRKGFCEAPGNRTQSGNHPEDWPVYQEGCMEKVQAWLQENLGIILGVGVGVAIIELLGMVLSICLCRHVHSEDYSKVPKYXGSCYPHLPAWPPTSGLPGVSLAPSSRPASHFTAKTLLPILTESRGLSGA

SEQ ID NO: 1391 - protein, 911 aa, Homo Sapiens
  misc_feature (883)..(883): Xaa can be any naturally occurring amino acid
MGPWSRSLSALLLLLQVSSWLCQEPEPCHPGFDAESYTFTVPRRHLERGRVLGRVNFEDCTGRQRTAYFSLDTRFKVGTDGVITVKRPLRFHNPQIHFLVYAWDSTYRKFSTKVTLNTVGHHHRPPPHQASVSGIQAELLTFPNSSPGLRRQKRDWVIPPISCPENEKGPFPKNLVQIKSNKDKEGKVFYSITGQGADTPPVGVFIIERETGWLKVTEPLDRERIATYTLFSHAVSSNGNAVEDPMEILITVTDQNDNKPEFTQEVFKGSVMEGALPGTSVMEVTATDADDDVNTYNAAIAYTILSQDPELPDKNMFTINRNTGVISVVTTGLDRESFPTYTLVVQAADLQGEGLSTTATAVITVTDTNDNPPIFNPTTYKGQVPENEANVVITTLKVTDADAPNTPAWEAVYTILNDDGGQFVVTTNPVNNDGILKTAKGLDFEAKQQYILHVAVTNVVPFEVSLTTSTATVTVDVLDVNEAPIFVPPEKRVEVSEDFGVGQEITSYTAQEPDTFMEQKITYRIWRDTANWLEINPDTGAISTRAELDREDFEHVKNSTYTALIIATDNGSPVATGTGTLLLILSDVNDNAPIPEPRTIFFCERNPKPQVINIIDADLPPNTSPFTAELTHGASANWTIQYNDPTQESIILKPKMALEVGDYKINLKLMDNQNKDQVTTLEVSVCDCEGAAGVCRKAQPVEAGLQIPAILGILGGILALLILILLLLLFLRRRAVVKEPLLPPEDDTRDNVYYYDEEGGGEEDQDFDLSQLHRGLDARPEVTRNDVAPTLMSVPRYLPRPANPDEIGNFIDENLKAADTDPTAPPYDSLLVFDYEGSGSEAASLSSLNSSESDKDQDYDYLNEWGNRFKKLADMYGGGEDDXGTRERRAPDPCAGKCRNHVAGGFSAPFP

SEQ ID NO: 1392 - protein, 815 aa, Homo Sapiens
  misc_feature (785)..(785): Xaa can be any naturally occurring amino acid
MQRLMMLLATSGACLGLLAVAAVAAAGANPAQRDTHSLLPTHRRQKRDWIWNQMHIDEEKNTSLPHHVGKIKSSVSRKNAKYLLKGEYVGKVFRVDAETGDVFAIERLDRENISEYHLTAVIVDKDTGENLETPSSFTIKVHDVNDNWPVFTHRLFNASVPESSAVGTSVISVTAVDADDPTVGDHASVMYQILKGKEYFAIDNSGRIITITKSLDREKQARYEIVVEARDAQGLRGDSGTATVLVTLQDINDNFPFFTQTKYTFVVPEDTRVGTSVGSLFVEDPDEPQNRMTKYSILRGDYQDAFTIETNPAHNEGIIKPMKPLDYEYIQQYSFIVEATDPTIDLRYMSPPAGNRAQVIINITDVDEPPIFQQPFYHFQLKENQKKPLIGTVLAMDPDAARHSIGYSIRRTSDKGQFFRVTKKGDIYNEKELDREVYPWYNLTVEAKELDSTGTPTGKESIVQVHIEVLDENDNAPEFAKPYQPKVCENAVHGQLVLQISAIDKDITPRNVKFKFTLNTENNFTLTDNHDNTANITVKYGQFDREHTKVHFLPVVISDNGMPSRTGTSTLTVAVCKCNEQGEFTFCEDMAAQVGVSIQAVVAILLCILTITVITLLIFLRRRLRKQARAHGKSVPEIHEQLVTYDEEGGGEMDTTSYDVSVLNSVRRGGAKPPRPALDARPSLYAQVQKPPRHAPGAHGGPGEMAAMIEVKKDEADHDGDGPPYDTLHIYGYEGSESIAESLSSLGTDSSDSDVDYDFLNDWGPRFKMLAELYGSDPREELLYXAAEVTLGLGTQTPCSPGQSDARHHSLQKWQ

SEQ ID NO: 1393 - protein, 188 aa, Homo Sapiens
  misc_feature (165)..(165): Xaa can be any naturally occurring amino acid
MSEPAGDVRQNPCGSKACRRLFGPVDSEQLSRDCDALMAGCIQEARERWNFDFVTETPLEGDFAWERVRGLGLPKLYLPTGPRRGRDELGGGRRPGTSPALLQGTAEEDHVDLSLSCTLVPRSGEQAEGSPGGPGDSQGRKRRQTSMTDFYHSKRRLIFSKRKPXSAHRKPAVLEARGPQRPALHLLP

SEQ ID NO: 1394 - protein, 3130 aa, Homo Sapiens
  misc_feature (3115)..(3115): Xaa can be any naturally occurring amino acid
MSWALEEWKEGLPTRALQKIQELEGQLDKLKKEKQQRQFQLDSLEAALQKQKQKVENEKTEGTNLKRENQRLMEICESLEKTKQKISHELQVKESQVNFQEGQLNSGKKQIEKLEQELKRCKSELERSQQAAQSADVSLNPCNTPQKIFTTPLTPSQYYSGSKYEDLKEKYNKEVEERKRLEAEVKALQAKKASQTLPQATMNHRDIARHQASSSVFSWQQEKTPSHLSSNSQRTPIRRDFSASYFSGEQEVTPSRSTLQIGKRDANSSFFDNSSSPHLLDQLKAQNQELRNKINELELRLQGHEKEMKGQVNKFQELQLQLEKAKVELIEKEKVLNKCRDELVRTTAQYDQASTKYTALEQKLKKLTEDLSCQRQNAESARCSLEQKIKEKEKEFQEELSRQQRSFQTLDQECIQMKARLTQELQQAKNMHNVLQAELDKLTSVKQQLENNLEEFKQKLCRAEQAFQASQIKENELRRSMEEMKKENNLLKSHSEQKAREVCHLEAELKNIKQCLNQSQNFAEEMKAKNTSQETMLRDLQEKINQQENSLTLEKLKLAVADLEKQRDCSQDLLKKREHHIEQLNDKLSKTEKESKALLSALELKKKEYEELKEEKTLFSCWKSENEKLLTQMESEKENLQSKINHLETCLKTQQIKSHEYNERVRTLEMDRENLSVEIRNLHNVLDSKSVEVETQKLAYMELQQKAEFSDQKHQKEIENMCLKTSQLTGQVEDLEHKLQLLSNEIMDKDRCYQDLHAEYESLRDLLKSKDASLVTNEDHQRSLLAFDQQPAMHHSFANIIGEQGSMPSERSECRLEADQSPKNSAILQNRVDSLEFSLESQKQMNSDLQKQCEELVQIKGEIEENLMKAEQMHQSFVAETSQRISKLQEDTSAHQNVVAETLSALENKEKELQLLNDKVETEQAEIQELKKSNHLLEDSLKELQLLSETLSLEKKEMSSIISLNKREIEELTQENGTLKEINASLNQEKMNLIQKSESFANYIDEREKSISELSDQYKQEKLILLQRCEETGNAYEDLSQKYKAAQEKNSKLECLLNECTSLCENRKNELEQLKEAFAKEHQEFLTKLAFAEERNQNLMLELETVQQALRSEMTDNQNNSKSEAGGLKQEIMTLKEEQNKMQKEVNDLLQENEQLMKVMKTKHECQNLESEPIRNSVKERESERNQCNFKPQMDLEVKEISLDSYNAQLVQLEAMLRNKELKLQESEKEKECLQHELQTIRGDLETSNLQDMQSQEISGLKDCEIDAEEKYISGPHELSTSQNDNAHLQCSLQTTMNKLNELEKICEILQAEKYELVTELNDSRSECITATRKMAEEVGKLLNEVKILNDDSGLLHGELVEDIPGGEFGEQPNEQHPVSLAPLDESNSYEHLTLSDKEVQMHFAELQEKFLSLQSEHKILHDQHCQMSSKMSELQTYVDSLKAENLVLSTNLRNFQGDLVKEMQLGLEEGLVPSLSSSCVPDSSSLSSLGDSSFYRALLEQTGDMSLLSNLEGAVSANQCSVDEVFCSSLQEENLTRKETPSAPAKGVEELESLCEVYRQSLEKLEEKMESQGIMKNKEIQELEQLLSSERQELDCLRKQYLSENEQWQQKLTSVTLEMESKLAAEKKQTEQLSLELEVARLQLQGLDLSSRSLLGIDTEDAIQGRNESCDISKEHTSETTERTPKHDVHQICDKDAQQDLNLDIEKITETGAVKPTGECSGEQSPDTNYEPPGEDKTQGSSECISELSFSGPNALVPMDFLGNQEDIHNLQLRVKETSNENLRLLHVIEDRDRKVESLLNEMKELDSKLHLQEVQLMTKIEACIELEKIVGELKKENSDLSEKLEYFSCDHQELLQRVETSEGLNSDLEMHADKSSREDIGDNVAKVNDSWKERFLDVENELSRIRSEKASIEHEALYLEADLEVVQTEKLCLEKDNENKQKVIVCLEEELSVVTSERNQLRGELDTMSKKTTALDQLSEKMKEKTQELESHQSECLHCIQVAEAEVKEKTELLQTLSSDVSELLKDKTHLQEKLQSLEKDSQALSLTKCELENQIAQLNKEKELLVKESESLQARLSESDYEKLNVSKALEAALVEKGEFALRLSSTQEEVHQLRRGIEKLRVRIEADEKKQLHIAEKLKERERENDSLKDKVENLERELQMSEENQELVILDAENSKAEVETLKTQIEEMARSLKVFELDLVTLRSEKENLTKQIQEKQGQLSELDKLLSSFKSLLEEKEQAEIQIKEESKTAVEMLQNQLKELNEAVAALCGDQEIMKATEQSLDPPIEEEHQLRNSIEKLRARLEADEKKQLCVLQQLKESEHHADLLKGRVENLERELEIARTNQEHAALEAENSKGEVETLKAKIEGMTQSLRGLELDVVTIRSEKENLTNELQKEQERISELEIINSSFENILQEKEQEKVQMKEKSSTAMEMLQTQLKELNERVAALHNDQEACKAKEQNLSSQVECLELEKAQLLQGLDEAKNNYIVLQSSVNGLIQEVEDGKQKLEKKDEEISRLKNQIQDQEQLVSKLSQVEGEHQLWKEQNLELRNLTVELEQKIQVLQSKNASLQDTLEVLQSSYKNLENELELTKMDKMSFVEKVNKMTAKETELQREMHEMAQKTAELQEELSGEKNRLAGELQLLLEEIKSSKDQLKELTLENSELKKSLDCMHKDQVEKEGKVREEIAEYQLRLHEAEKKHQALLLDTNKQYEVEIQTYREKLTSKEECLSSQKLEIDLLKSSKEELNNSLKATTQILEELKKTKMDNLKYVNQLKKENERAQGKMKLLIKSCKQLEEEKEILQKELSQLQAAQEKQKTGTVMDTKVDELTTEIKELKETLEEKTKEADEYLDKYCSLLISHEKLEKAKEMLETQVAHLCSQQSKQDSRGSPLLGPVVPGPSPIPSVTEKRLSSGQNKASGKRQRSSGIWENGRGPTPATPESFSKKSKKAVMSGIHPAEDTEGTEFEPEGLPEVVKKGFADIPTGKTSPYILRRTTMATRTSPRLAAQKLALSPLSLGKENLAESSKPTAGGSRSQKVKVAQRSPVDSGTILREPTTKSVPVNNLPERSPTDSPREGLRVKRGRLVPSPKAGLESNGSENCKVQXRHFVCQYPWEVPVIE

SEQ ID NO: 1395 - protein, 1484 aa, Homo Sapiens
  misc_feature (1481)..(1481): Xaa can be any naturally occurring amino acid
MQRSPLEKASVVSKLFFSWTRPILRKGYRQRLELSDIYQIPSVDSADNLSEKLEREWDRELASKKNPKLINALRRCFFWRFMFYGIFLYLGEVTKAVQPLLLGRIIASYDPDNKEERSIAIYLGIGLCLLFIVRTLLLHPAIFGLHHIGMQMRIAMFSLIYKKTLKLSSRVLDKISIGQLVSLLSNNLNKFDEGLALAHFVWIAPLQVALLMGLIWELLQASAFCGLGFLIVLALFQAGLGRMMMKYRDQRAGKISERLVITSEMIENIQSVKAYCWEEAMEKMIENLRQTELKLTRKAAYVRYFNSSAFFFSGFFVVFLSVLPYALIKGIILRKIFTTISFCIVLRMAVTRQFPWAVQTWYDSLGAINKIQDFLQKQEYKTLEYNLTTTEVVMENVTAFWEEGFGELFEKAKQNNNNRKTSNGDDSLFFSNFSLLGTPVLKDINFKIERGQLLAVAGSTGAGKTSLLMVIMGELEPSEGKIKHSGRISFCSQFSWIMPGTIKENIIFGVSYDEYRYRSVIKACQLEEDISKFAEKDNIVLGEGGITLSGGQRARISLARAVYKDADLYLLDSPFGYLDVLTEKEIFESCVCKLMANKTRILVTSKMEHLKKADKILILHEGSSYFYGTFSELQNLQPDFSSKLMGCDSFDQFSAERRNSILTETLHRFSLEGDAPVSWTETKKQSFKQTGEFGEKRKNSILNPINSIRKFSIVQKTPLQMNGIEEDSDEPLERRLSLVPDSEQGEAILPRISVISTGPTLQARRRQSVLNLMTHSVNQGQNIHRKTTASTRKVSLAPQANLTELDIYSRRLSQETGLEISEEINEEDLKECFFDDMESIPAVTTWNTYLRYITVHKSLIFVLIWCLVIFLAEVAASLVVLWLLGNTPLQDKGNSTHSRNNSYAVIITSTSSYYVFYIYVGVADTLLAMGFFRGLPLVHTLITVSKILHHKMLHSVLQAPMSTLNTLKAGGILNRFSKDIAILDDLLPLTIFDFIQLLLIVIGAIAVVAVLQPYIFVATVPVIVAFIMLRAYFLQTSQQLKQLESEGRSPIFTHLVTSLKGLWTLRAFGRQPYFETLFHKALNLHTANWFLYLSTLRWFQMRIEMIFVIFFIAVTFISILTTGEGEGRVGIILTLAMNIMSTLQWAVNSSIDVDSLMRSVSRVFKFIDMPTEGKPTKSTKPYKNGQLSKVMIIENSHVKKDDIWPSGGQMTVKDLTAKYTEGGNAILENISFSISPGQRVGLLGRTGSGKSTLLSAFLRLLNTEGEIQIDGVSWDSITLQQWRKAFGVIPQKVFIFSGTFRKNLDPYEQWSDQEIWKVADEVGLRSVIEQFPGKLDFVLVDGGCVLSHGHKQLMCLARSVLSKAKILLLDEPSAHLDPVTYQIIRRTLKQAFADCTVILCEHRIEAMLECQQFLVIEENKVRQYDSIQKLLNERSLFRQAISPSDRVKLFPHRNSSKCKSKPQIAALKEETEEEVQDTRLXRAA

SEQ ID NO: 1396 - protein, 124 aa, Homo Sapiens
  misc_feature (117)..(117): Xaa can be any naturally occurring amino acid
MDYYRKYAAIFLVTLSVFLHVLHSAPDVQDCPECTLQENPFFSQPGAPILQCMGCCFSRAYPTPLRSKKTMLVQKNVTSESTCCVAKSYNRVTVMGGFKVENHTACHCSTCYYHKSXMFYQVLS

SEQ ID NO: 1397 - protein, 531 aa, Homo Sapiens
  misc_feature (458)..(458): Xaa can be any naturally occurring amino acid
MRSAAVLALLLCAGQVTALPVNSPMNKGDTEVMKCIVEVISDTLSKPSPMPVSQECFETLRGDERILSILRHQNLLKELQDLALQGAKERAHQQKKHSGFEDELSEVLENQSSQAELKEAVEEPSSKDVMEKREDSKEAEKSGEATDGARPQALPEPMQESKAEGNNQAPGEEEEEEEEATNTHPPASLPSQKYPGPQAEGDSEGLSQGLVDREKGLSAEPGWQAKREEEEEEEEEAEAGEEAVPEEEGPTVVLNPHPSLGYKEIRKGESRSEALAVDGAGKPGAEEAQDPEGKGEQEHSQQKEEEEEMAVVPQGLFRGGKSGELEQEEERLSKEWEDSKRWSKMDQLAKELTAEKRLEGQEEEEDNRDSSMKLSFRARAYGFRGPGPQLRRGWRPSSREDSLEAGLPLQVRGYPEEKKEEEGSANRRPEDQELESLSAIEAELEKVAHQLQALRRGXDTGWQGWPQGTLWPWLCCPLGRSWPDGPDAASGREAASSLPKPRPPYRPLRALSPTPDSYLPWNILCRAAPQL

SEQ ID NO: 1398 - protein, 413 aa, Homo Sapiens
  misc_feature (384)..(384): Xaa can be any naturally occurring amino acid
MGVKASQTGFVVLVLLQCCSAYKLVCYYTSWSQYREGDGSCFPDALDRFLCTHIIYSFANISNDHIDTWEWNDVTLYGMLNTLKNRNPNLKTLLSVGGWNFGSQRFSKIASNTQSRRTFIKSVPPFLRTHGFDGLDLAWLYPGRRDKQHFTTLIKEMKAEFIKEAQPGKKQLLLSAALSAGKVTIDSSYDIAKISQHLDFISIMTYDFHGAWRGTTGHHSPLFRGQEDASPDRFSNTDYAVGYMLRLGAPASKLVMGIPTFGRSFTLASSETGVGAPISGPGIPGRFTKEAGTLAYYEICDFLRGATVHRILGQQVPYATKGNQWVGYDDQESVKSKVQYLKDRQLAGAMVWALDLDDFQGSFCGQDLRFPLTNAIKDALAATXPSVLHTARGPRMPRPPLAPAGREPDHLPC

SEQ ID NO: 1399 - protein, 433 aa, Homo Sapiens
  misc_feature (382)..(382): Xaa can be any naturally occurring amino acid
MPFSNSHNALKLRFPAEDEFPDLSAHNNHMAKVLTPELYAELRAKSTPSGFTLDDVIQTGVDNPGHPYIMTVGCVAGDEESYEVFKDLFDPIIEDRHGGYKPSDEHKTDLNPDNLQGGDDLDPNYVLSSRVRTGRSIRGFCLPPHCSRGERRAIEKLAVEALSSLDGDLAGRYYALKSMTEAEQQQLIDDHFLFDKPVSPLLLASGMARDWPDARGIWHNDNKTFLVWVNEEDHLRVISMQKGGNMKEVFTRFCTGLTQIETLFKSKDYEFMWNPHLGYILTCPSNLGTGLRAGVHIKLPNLGKHEKFSEVLKRLRLQKRGTGGVDTAAVGGVFDVSNADRLGFSEVELVQMVVDGVKLLIEMEQRLEQGQAIDDLMPAQKXSPAHTRHQPCCFLTYCLGSAHHAPLMFAVWRALSLAVETSVTLGRVYFFDG

SEQ ID NO: 1400 - protein, 522 aa, Homo Sapiens
  misc_feature (450)..(450): Xaa can be any naturally occurring amino acid
MMKTLLLFVGLLLTWESGQVLGDQTVSDNELQEMSNQGSKYVNKEIQNAVNGVKQIKTLIEKTNEERKTLLSNLEEAKKKKEDALNETRESETKLKELPGVCNETMMALWEECKPCLKQTCMKFYARVCRSGSGLVGRQLEEFLNQSSPFYFWMNGDRIDSLLENDRQQTHMLDVMQDHFSRASSIIDELFQDRFFTREPQDTYHYLPFSLPHRRPHFFFPKSRIVRSLMPFSPYEPLNFHAMFQPFLEMIHEAQQAMDIHFHSPAFQHPPTEFIREGDDDRTVCREIRHNSTGCLRMKDQCDKCREILSVDCSTNNPSQAKLRRELDESLQVAERLTRKYNELLKSYQWKMLNTSSLLEQLNEQFNWVSRLANLTQGEDQYYLRVTTVASHTSDSDVPSGVTEVVVKLFDSDPITVTVPVEVSRKNPKFMETVAEKALQEYRKKHREEXDVDVAFAPTGASESSSPQDELQPPRESSARHQVTRPQPPGPQLRPASPRSGSCTLTLDSAAHGKNRIAPACN

SEQ ID NO: 1401 - protein, 227 aa, Homo Sapiens
  misc_feature (201)..(201): Xaa can be any naturally occurring amino acid
MAFTEHSPLTPHRRDLCSRSIWLARKIRSDLTALTESYVKHQGLNKNINLDSADGMPVASTDQWSELTEAERLQENLQAYRTFHVLLARLLEDQQVHFTPTEGDFHQAIHTLLLQVAAFAYQIEELMILLEYKIPRNEADGMPINVGDGGLFEKKLWGLKVLQELSQWTVRSIHDLRFISSHQTGIPARGSHYIANNKKMXQLVPSLFLAFSSNGICVVPWGLAFPS

SEQ ID NO: 1402 - protein, 1491 aa, Homo Sapiens
  misc_feature (1465)..(1465): Xaa can be any naturally occurring amino acid
MFSFVDLRLLLLLAATALLTHGQEEGQVEGQDEDIPPITCVQNGLRYHDRDVWKPEPCRICVCDNGKVLCDDVICDETKNCPGAEVPEGECCPVCPDGSESPTDQETTGVEGPKGDTGPRGPRGPAGPPGRDGIPGQPGLPGPPGPPGPPGPPGLGGNFAPQLSYGYDEKSTGGISVPGPMGPSGPRGLPGPPGAPGPQGFQGPPGEPGEPGASGPMGPRGPPGPPGKNGDDGEAGKPGRPGERGPPGPQGARGLPGTAGLPGMKGHRGFSGLDGAKGDAGPAGPKGEPGSPGENGAPGQMGPRGLPGERGRPGAPGPAGARGNDGATGAAGPPGPTGPAGPPGFPGAVGAKGEAGPQGPRGSEGPQGVRGEPGPPGPAGAAGPAGNPGADGQPGAKGANGAPGIAGAPGFPGARGPSGPQGPGGPPGPKGNSGEPGAPGSKGDTGAKGEPGPVGVQGPPGPAGEEGKRGARGEPGPTGLPGPPGERGGPGSRGFPGADGVAGPKGPAGERGSPGPAGPKGSPGEAGRPGEAGLPGAKGLTGSPGSPGPDGKTGPPGPAGQDGRPGPPGPPGARGQAGVMGFPGPKGAAGEPGKAGERGVPGPPGAVGPAGKDGEAGAQGPPGPAGPAGERGEQGPAGSPGFQGLPGPAGPPGEAGKPGEQGVPGDLGAPGPSGARGERGFPGERGVQGPPGPAGPRGANGAPGNDGAKGDAGAPGAPGSQGAPGLQGMPGERGAAGLPGPKGDRGDAGPKGADGSPGKDGVRGLTGPIGPPGPAGAPGDKGESGPSGPAGPTGARGAPGDRGEPGPPGPAGFAGPPGADGQPGAKGEPGDAGAKGDAGPPGPAGPAGPPGPIGNVGAPGAKGARGSAGPPGATGFPGAAGRVGPPGPSGNAGPPGPPGPAGKEGGKGPRGETGPAGRPGEVGPPGPPGPAGEKGSPGADGPAGAPGTPGPQGIAGQRGVVGLPGQRGERGFPGLPGPSGEPGKQGPSGASGERGPPGPMGPPGLAGPPGESGREGAPGAEGSPGRDGSPGAKGDRGETGPAGPPGAPGAPGAPGPVGPAGKSGDRGETGPAGPAGPVGPVGARGPAGPQGPRGDKGETGEQGDRGIKGHRGFSGLQGPPGPPGSPGEQGPSGASGPAGPRGPPGSAGAPGKDGLNGLPGPIGPPGPRGRTGDAGPVGPPGPPGPPGPPGPPSAGFDFSFLPQPPQEKAHDGGRYYRADDANVVRDRDLEVDTTLKSLSQQIENIRSPEGSRKNPARTCRDLKMCHSDWKSGEYWIDPNQGCNLDAIKVFCNMETGETCVYPTQPSVAQKNWYISKNPKDKRHVWFGESMTDGFQFEYGGQGSDPADVAIQLTFLRLMSTEASQNITYHCKNSVAYMDQQTGNLKKALLLQGSNEIEIRAEGNSRFTYSVTVDGCTSHTGAWGKTVIEYKTTKTSRLPIIDVAPLDVGAPDQEFGFDVGPVCFLXTPSIPTWLPPTQPTFPPTRKQTSNPN

SEQ ID NO: 1403 - protein, 294 aa, Homo Sapiens
  misc_feature (225)..(225): Xaa can be any naturally occurring amino acid
MEKLLCFLVLTSLSHAFGQTDMSRKAFVFPKESDTSYVSLKAPLTKPLKAFTVCLHFYTELSSTRGYSIFSYATKRQDNEILIFWSKDIGYSFTVGGSEILFEVPEVTVAPVHICTSWESASGIVEFWVDGKPRVRKSLKKGYTVGAEASIILGQEQDSFGGNFEGSQSLVGDIGNVNMWDFVLSPDEINTIYLGGPFSPNVLNWRALKYEVQGEVFTKPQLWPXGPAVGPEGTSRFFTPHGPHVSVSGTSRFFTLHGSHVSVSGPLFPYMHCRPAPPSSAPENGGKVSGLGAR

SEQ ID NO: 1404 - protein, 558 aa, Homo Sapiens
  misc_feature (555)..(555): Xaa can be any naturally occurring amino acid
MTAPGAAGRCPPTTWLGSLLLLVCLLASRSITEEVSEYCSHMIGSGHLQSLQRLIDSQMETSCQITFEFVDQEQLKDPVCYLKKAFLLVQDIMEDTMRFRDNTPNAIAIVQLQELSLRLKSCFTKDYEEHDKACVRTFYETPLQLLEKVKNVFNETKNLLDKDWNIFSKNCNNSFAECSSQDVVTKPDCNCLYPKAIPSSDPASVSPHQPLAPSMAPVAGLTWEDSEGTEGSSLLPGEQPLHTVDPGSAKQRPPRSTCQSFEPPETPVVKDSTIGGSPQPRPSVGAFNPGMEDILDSAMGTNWVPEEASGEASEIPVPQGTELSPSRPGGGSMQTEPARPSNFLSASSPLPASAKGQQPADVTGTALPRVGPVRPTGQDWNHTPQKTDHPSALLRDPPEPGSPRISSLRPQGLSNPSTLSAQPQLSRSHSSGSVLPLGELEGRRSTRDRRSPAEPEGGPASEGAARPLPRFNSVPLTDTGHERQSEGSSSPQLQESVFHLLVPSVILVLLAVGGLLFYRWRRRSHQEPQRADSPLEQPEGSPLTQDDRQVELPVXREF

SEQ ID NO: 1405 - protein, 207 aa, Homo Sapiens
  misc_feature (145)..(145): Xaa can be any naturally occurring amino acid
MWLQSLLLLGTVACSISAPARSPSPSTQPWEHVNAIQEARRLLNLSRDTAAEMNETVEVISEMFDLQEPTCLQTRLELYKQGLRGSLTKLKGPLTMMASHYKQHCPPTPETSCATQIITFESFKENLKDFLLVIPFDCWEPVQEXDRPDEAGQAGELLSHETRARNSGWSSWRDQGVGHSHGGSGLDLPWATLTLIQAWQKNGNILY

SEQ ID NO: 1406 - protein, 220 aa, Homo Sapiens
  misc_feature (208)..(208): Xaa can be any naturally occurring amino acid
MAGPATQSPMKLMALQLLLWHSALWTVQEATPLGPASSLPQSFLLKCLEQVRKIQGDGAALQEKLVSECATYKLCHPEELVLLGHSLGIPWAPLSSCPSQALQLAGCLSQLHSGLFLYQGLLQALEGISPELGPTLDTLQLDVADFATTIWQQMEELGMAPALQPTQGAMPAFASAFQRRAGGVLVASHLQSFLEVSYRVLRHLAQPXAKPSPSHVFISI

SEQ ID NO: 1407 - protein, 217 aa, Homo Sapiens
  misc_feature (205)..(205): Xaa can be any naturally occurring amino acid
MAGPATQSPMKLMALQLLLWHSALWTVQEATPLGPASSLPQSFLLKCLEQVRKIQGDGAALQEKLCATYKLCHPEELVLLGHSLGIPWAPLSSCPSQALQLAGCLSQLHSGLFLYQGLLQALEGISPELGPTLDTLQLDVADFATTIWQQMEELGMAPALQPTQGAMPAFASAFQRRAGGVLVASHLQSFLEVSYRVLRHLAQPXAKPSPSHVFISI

SEQ ID NO: 1408 - protein, 220 aa, Homo Sapiens
  misc_feature (142)..(142): Xaa can be any naturally occurring amino acid
MAWPLCTLLLLLATQAVALAWSPQEEDRIIEGGIYDADLNDERVQRALHFVISEYNKATEDEYYRRLLRVLRAREQIVGGVNYFFDIEVGRTICTKSQPNLDTCAFHEQPELQKKQLCSFQIYEVPWEDRMSLVNSRCQEAXGSVPGSHTDHLLLPPLVVLPPLDWWPPPCGRSPHAPAAGEDREGCRRPLLLSRGLCPPSFLLLLIALVHGTHTPTSCN

SEQ ID NO: 1409 - protein, 214 aa, Homo Sapiens
  misc_feature (147)..(147): Xaa can be any naturally occurring amino acid
MAGPLRAPLLLLAILAVALAVSPAAGSSPGKPPRLVGGPMDASVEEEGVRRALDFAVGEYNKASNDMYHSRALQVVRARKQIVAGVNYFLDVELGRTTCTKTQPNLDNCPFHDQPHLKRKAFCSFQIYAVPWQGTMTLSKSTCQDAXGSVPGWPVPITSYAHLPPPVFPPLDWWPLPWGRSPHVPAPGDRQRRQQAAFVAQQGALPSLLPSCFS

SEQ ID NO: 1410 - protein, 373 aa, Homo Sapiens
  misc_feature (340)..(340): Xaa can be any naturally occurring amino acid
MWQLWASLCCLLVLANARSRPSFHPLSDELVNYVNKRNTTWQAGHNFYNVDMSYLKRLCGTFLGGPKPPQRVMFTEDLKLPASFDAREQWPQCPTIKEIRDQGSCGSCWAFGAVEAISDRICIHTNAHVSVEVSAEDLLTCCGSMCGDGCNGGYPAEAWNFWTRKGLVSGGLYESHVGCRPYSIPPCEHHVNGSRPPCTGEGDTPKCSKICEPGYSPTYKQDKHYGYNSYSVSNSEKDIMAEIYKNGPVEGAFSVYSDFLLYKSGVYQHVTGEMMGGHAIRILGWGVENGTPYWLVANSWNTDWGDNGFFKILRGQDHCGIESEVVAGIPRTDQYWEKIXSAVGLSCQSWGRDRGRNAFYSLSSRKIQVSDRV

SEQ ID NO: 1411 - protein, 586 aa, Homo Sapiens
  misc_feature (413)..(413): Xaa can be any naturally occurring amino acid
MQPSSLLPLALCLLAAPASALVRIPLHKFTSIRRTMSEVGGSVEDLIAKGPVSKYSQAVPAVTEGPIPEVLKNYMDAQYYGEIGIGTPPQCFTVVFDTGSSNLWVPSIHCKLLDIACWIHHKYNSDKSSTYVKNGTSFDIHYGSGSLSGYLSQDTVSVPCQSASSASALGGVKVERQVFGEATKQPGITFIAAKFDGILGMAYPRISVNNVLPVFDNLMQQKLVDQNIFSFYLSRDPDAQPGGELMLGGTDSKYYKGSLSYLNVTRKAYWQVHLDQVEVASGLTLCKEGCEAIVDTGTSLMVGPVDEVRELQKAIGAVPLIQGEYMIPCEKVSTLPAITLKLGGKGYKLSPEDYTLKVSQAGKTLCLSGFMGMDIPPPSGPLWILGDVFIGRYYTVFDRDNNRVGFAEAARLXFPRRPRASTETEESPRAGGPWPSGPSHTHPHTRPPTVLGALEAGGPSPTCCFVLWFSPPWVQKCCLPVCLSICLVGVELIQSTDLFRALEDPTQAWQPSSCILGLPSSPGSPLPGPTSARWAEPLPHTRPSSRALPWKPALPEGPSAQLGPSWALPPYLFSVPGPLRMRPLEA

SEQ ID NO: 1412 - protein, 338 aa, Homo Sapiens
  misc_feature (334)..(334): Xaa can be any naturally occurring amino acid
MNPTLILAAFCLGIASATLTFDHSLEAQWTKWKAMHNRLYGMNEEGWRRAVWEKNMKMIELHNQEYREGKHSFTMAMNAFGDMTSEEFRQVMNGFQNRKPRKGKVFQEPLFYEAPRSVDWREKGYVTPVKNQGQCGSCWAFSATGALEGQMFRKTGRLISLSEQNLVDCSGPQGNEGCNGGLMDYAFQYVQDNGGLDSEESYPYEATEESCKYNPKYSVANDTGFVDIPKQEKALMKAVATVGPISVAIDAGHESFLFYKEGIYFEPDCSSEDMDHGVLVVGYGFESTESDNNKYWLVKNSWGEEWGMGGYVKMAKDRRNHCGIASAASYPTVXAGGR

SEQ ID NO: 1413 - protein, 135 aa, Homo Sapiens
  misc_feature (99)..(99): Xaa can be any naturally occurring amino acid
MNQTAILICCLIFLTLSGIQGVPLSRTVRCTCISISNQPVNPRSLEKLEIIPASQFCPRVEIIATMKKKGEKRCLNPESKAIKNLLKAVSKERSKRSPXNQRGAKSMQCFQGWTTQRLPLPSLPYMEYMSSHNCS

SEQ ID NO: 1414 - protein, 137 aa, Homo Sapiens
  misc_feature (115)..(115): Xaa can be any naturally occurring amino acid
MSLLSSRAARVPGPSSSLCALLVLLLLLTQPGPIASAGPAAAVLRELRCVCLQTTQGVHPKMISNLQVFAIGPQCSKVEVVASLKNGKEICLDPEAPFLKKVIQKILDGGNKENXLREMSTHGKVSQSSAEKFSGGL

SEQ ID NO: 1415 - protein, 129 aa, Homo Sapiens
  misc_feature (95)..(95): Xaa can be any naturally occurring amino acid
MRTLAILAAILLVALQAQAEPLQARADEVAAAPEQIAADIPEVVVSLAWDESLAPKHPGSRKNMDCYCRIPACIAGERRYGTCIYQGRLWAFCCXACRKRKMSSKFALRATGNCYYSCTFCSISFPHLK

SEQ ID NO: 1416 - protein, 621 aa, Homo Sapiens
  misc_feature (471)..(471): Xaa can be any naturally occurring amino acid
MSQAYSSSQRVSSYRRTFGGAPGFPLGSPLSSPVFPRAGFGSKGSSSSVTSRVYQVSRTSGGAGGLGSLRASRLGTTRTPSSYGAGELLDFSLADAVNQEFLTTRTNEKVELQELNDRFANYIEKVRFLEQQNAALAAEVNRLKGREPTRVAELYEEELRELRRQVEVLTNQRARVDVERDNLLDDLQRLKAKLQEEIQLKEEAENNLAAFRADVDAATLARIDLERRIESLNEEIAFLKKVHEEEIRELQAQLQEQQVQVEMDMSKPDLTAALRDIRAQYETIAAKNISEAEEWYKSKVSDLTQAANKNNDALRQAKQEMMEYRHQIQSYTCEIDALKGTNDSLMRQMRELEDRFASEASGYQDNIARLEEEIRHLKDEMARHLREYQDLLNVKMALDVEIATYRKLLEGEESRINLPIQTYSALNFRETSPEQRGSEVHTKKTVMIKTIETRDGEVVSEATQQQHEVLXRQRPSATRDRPHPCPHCSLKPAFFHPRTPHPASVLPSQPLTPPHWPSLVVPNSDIAHPCLVTGHAPATSADPSCEPWLLAVSEPGSCAGWSPGGSGGPVPPTSVTSGTSLWLWRQPQSRVLGYCRARTEPRRPPQPLAQERESQAGSQGD

SEQ ID NO: 1417 - protein, 222 aa, Homo Sapiens
  misc_feature (213)..(213): Xaa can be any naturally occurring amino acid
MDYLLMIFSLLFVACQGAPETAVLGAELSAVGENGGEKPTPSPPWRLRRSKRCSCSSLMDKECVYFCHLDIIWVNTPEHVVPYGLGSPRSKRALENLLPTKATDRENRCQCASQKDKKCWNFCQAGKELRAEDIMEKDWNNHKKGKDCSKLGKKCIYQQLVRGRKIRRSSEEHLRQTRSETMRNSVKSSFHDPKLKGKPSRERYVTHNRAHWXQTFGACLKP

SEQ ID NO: 1418 - protein, 1216 aa, Homo Sapiens
  misc_feature (1211)..(1211): Xaa can be any naturally occurring amino acid
MRPSGTAGAALLALLAALCPASRALEEKKVCQGTSNKLTQLGTFEDHFLSLQRMFNNCEVVLGNLEITYVQRNYDLSFLKTIQEVAGYVLIALNTVERIPLENLQIIRGNMYYENSYALAVLSNYDANKTGLKELPMRNLQEILHGAVRFSNNPALCNVESIQWRDIVSSDFLSNMSMDFQNHLGSCQKCDPSCPNGSCWGAGEENCQKLTKIICAQQCSGRCRGKSPSDCCHNQCAAGCTGPRESDCLVCRKFRDEATCKDTCPPLMLYNPTTYQMDVNPEGKYSFGATCVKKCPRNYVVTDHGSCVRACGADSYEMEEDGVRKCKKCEGPCRKVCNGIGIGEFKDSLSINATNIKHFKNCTSISGDLHILPVAFRGDSFTHTPPLDPQELDILKTVKEITGFLLIQAWPENRTDLHAFENLEIIRGRTKQHGQFSLAVVSLNITSLGLRSLKEISDGDVIISGNKNLCYANTINWKKLFGTSGQKTKIISNRGENSCKATGQVCHALCSPEGCWGPEPRDCVSCRNVSRGRECVDKCNLLEGEPREFVENSECIQCHPECLPQAMNITCTGRGPDNCIQCAHYIDGPHCVKTCPAGVMGENNTLVWKYADAGHVCHLCHPNCTYGCTGPGLEGCPTNGPKIPSIATGMVGALLLLLVVALGIGLFMRRRHIVRKRTLRRLLQERELVEPLTPSGEAPNQALLRILKETEFKKIKVLGSGAFGTVYKGLWIPEGEKVKIPVAIKELREATSPKANKEILDEAYVMASVDNPHVCRLLGICLTSTVQLITQLMPFGCLLDYVREHKDNIGSQYLLNWCVQIAKGMNYLEDRRLVHRDLAARNVLVKTPQHVKITDFGLAKLLGAEEKEYHAEGGKVPIKWMALESILHRIYTHQSDVWSYGVTVWELMTFGSKPYDGIPASEISSILEKGERLPQPPICTIDVYMIMVKCWMIDADSRPKFRELIIEFSKMARDPQRYLVIQGDERMHLPSPTDSNFYRALMDEEDMDDVVDADEYLIPQQGFFSSPSTSRTPLLSSLSATSNNSTVACIDRNGLQSCPIKEDSFLQRYSSDPTGALTEDSIDDTFLPVPEYINQSVPKRPAGSVQNPVYHNQPLNPAPSRDPHYQDPHSTAVGNPEYLNTVQPTCVNSTFDSPAHWAQKGSHQISLDNPDYQQDFFPKEAKPNGIFKGSTAENAEYLRVAPQSSEFIGAXPRRIV

SEQ ID NO: 1419 - protein, 409 aa, Homo Sapiens
  misc_feature (406)..(406): Xaa can be any naturally occurring amino acid
MRPSGTAGAALLALLAALCPASRALEEKKVCQGTSNKLTQLGTFEDHFLSLQRMFNNCEVVLGNLEITYVQRNYDLSFLKTIQEVAGYVLIALNTVERIPLENLQIIRGNMYYENSYALAVLSNYDANKTGLKELPMRNLQEILHGAVRFSNNPALCNVESIQWRDIVSSDFLSNMSMDFQNHLGSCQKCDPSCPNGSCWGAGEENCQKLTKIICAQQCSGRCRGKSPSDCCHNQCAAGCTGPRESDCLVCRKFRDEATCKDTCPPLMLYNPTTYQMDVNPEGKYSFGATCVKKCPRNYVVTDHGSCVRACGADSYEMEEDGVRKCKKCEGPCRKVCNGIGIGEFKDSLSINATNIKHFKNCTSISGDLHILPVAFRGDSFTHTPPLDPQELDILKTVKEITGLSXIIT

SEQ ID NO: 1420 - protein, 759 aa, Homo Sapiens
  misc_feature (706)..(706): Xaa can be any naturally occurring amino acid
MRPSGTAGAALLALLAALCPASRALEEKKVCQGTSNKLTQLGTFEDHFLSLQRMFNNCEVVLGNLEITYVQRNYDLSFLKTIQEVAGYVLIALNTVERIPLENLQIIRGNMYYENSYALAVLSNYDANKTGLKELPMRNLQEILHGAVRFSNNPALCNVESIQWRDIVSSDFLSNMSMDFQNHLGSCQKCDPSCPNGSCWGAGEENCQKLTKIICAQQCSGRCRGKSPSDCCHNQCAAGCTGPRESDCLVCRKFRDEATCKDTCPPLMLYNPTTYQMDVNPEGKYSFGATCVKKCPRNYVVTDHGSCVRACGADSYEMEEDGVRKCKKCEGPCRKVCNGIGIGEFKDSLSINATNIKHFKNCTSISGDLHILPVAFRGDSFTHTPPLDPQELDILKTVKEITGFLLIQAWPENRTDLHAFENLEIIRGRTKQHGQFSLAVVSLNITSLGLRSLKEISDGDVIISGNKNLCYANTINWKKLFGTSGQKTKIISNRGENSCKATGQVCHALCSPEGCWGPEPRDCVSCRNVSRGRECVDKCNLLEGEPREFVENSECIQCHPECLPQAMNITCTGRGPDNCIQCAHYIDGPHCVKTCPAGVMGENNTLVWKYADAGHVCHLCHPNCTYGPGNESLKAMLFCLFKLSSCNQSNDGSVSHQSGSPAAQESCLGWIPSLLPSEFQLGWGGCSHLHAWPSASVIITASSCHXASCLHVSVPPAFPFCHPCTWAARFPRVSYPFPSFHSLCQCLSPQLVANHHPQD

SEQ ID NO: 1421 - protein, 576 aa, Homo Sapiens
  misc_feature (544)..(544): Xaa can be any naturally occurring amino acid
MAAAKAEMQLMSPLQISDPFGSFPHSPTMDNYPKLEEMMLLSNGAPQFLGAAGAPEGSGSNSSSSSSGGGGGGGGGSNSSSSSSTFNPQADTGEQPYEHLTAESFPDISLNNEKVLVETSYPSQTTRLPPITYTGRFSLEPAPNSGNTLWPEPLFSLVSGLVSMTNPPASSSSAPSPAASSASASQSPPLSCAVPSNDSSPIYSAAPTFPTPNTDIFPEPQSQAFPGSAGTALQYPPPAYPAAKGGFQVPMIPDYLFPQQQGDLGLGTPDQKPFQGLESRTQQPSLTPLSTIKAFATQSGSQDLKALNTSYQSQLIKPSRMRKYPNRPSKTPPHERPYACPVESCDRRFSRSDELTRHIRIHTGQKPFQCRICMRNFSRSDHLTTHIRTHTGEKPFACDICGRKFARSDERKRHTKIHLRQKDKKADKSVVASSATSSLSSYPSPVATSYPSPVTTSYPSPATTSYPSPVPTSFSSPGSSTYPSPVHSGFPSPSVATTYSSVPPAFPAQVSSFPSSAVTNSFSASTGLSDMTATFSPRTIEICXRERGKKGKREKKKHKRLKGQEEEMAIGEEGSS

SEQ ID NO: 1422 - protein, 608 aa, Homo Sapiens
  misc_feature (590)..(590): Xaa can be any naturally occurring amino acid
MSVSVHENRKSRASSGSINIYLFHKSSYADSVLTHLNLLRQQRLFTDVLLHAGNRTFPCHRAVLAACSRYFEAMFSGGLKESQDSEVNFDNSIHPEVLELLLDYAYSSRVIINEENAESLLEAGDMLEFQDIRDACAEFLEKNLHPTNCLGMLLLSDAHQCTKLYELSWRMCLSNFQTIRKNEDFLQLPQDMVVQLLSSEELETEDERLVYESAINWISYDLKKRYCYLPELLQTVRLALLPAIYLMENVAMEELITKQRKSKEIVEEAIRCKLKILQNDGVVTSLCARPRKTGHALFLLGGQTFMCDKLYLVDQKAKEIIPKADIPSPRKEFSACAIGCKVYITGGRGSENGVSKDVWVYDTLHEEWSKAAPMLVARFGHGSAELKHCLYVVGGHTAATGCLPASPSVSLKQVEHYDPTINKWTMVAPLREGVSNAAVVSAKLKLFAFGGTSVSHDKLPKVQCYDQCENRWTVPATCPQPWRYTAAAVLGNQIFIMGGDTEFSACSAYKFNSETYQWTKVGDVTAKRMSCHAVASGNKLYVVGGYFGIQRCKTLDCYDPTLDVWNSITTVPYSLIPTAFVSTWKHLPSXMQYILKRVSMSSLHHSMR

SEQ ID NO: 1423 - protein, 455 aa, Homo Sapiens
  misc_feature (435)..(435): Xaa can be any naturally occurring amino acid
MSIEKIWAREILDSRGNPTVEVDLYTAKGLFRAAVPSGASTGIYEALELRDGDKQRYLGKGVLKAVDHINSTIAPALISSGLSVVEQEKLDNLMLELDGTENKSKFGANAILGVSLAVCKAGAAERELPLYRHIAQLAGNSDLILPVPAFNVINGGSHAGNKLAMQEFMILPVGAESFRDAMRLGAEVYHTLKGVIKDKYGKDATNVGDEGGFAPNILENSEALELVKEAIDKAGYTEKIVIGMDVAASEFYRDGKYDLDFKSPTDPSRYITGDQLGALYQDFVRDYPVVSIEDPFDQDDWAAWSKFTANVGIQIVGDDLTVTNPKRIERAVEEKACNCLLLKVNQIGSVTEAIQACKLAQENGWGVMVSHRSGETEDTFIADLVVGLCTGQIKTGAPCRSERLAKYNQLMRIEEELGDEARFAGHNFRNPSVLXFLCLPGDVEPLSHPPGTLLS

SEQ ID NO: 1424 - protein, 1029 aa, Homo Sapiens
  misc_feature (999)..(999): Xaa can be any naturally occurring amino acid
MVFQTRYPSWIILCYIWLLRFAHTGEAQAAKEVLLLDSKAQQTELEWISSPPNGWEEISGLDENYTPIRTYQVCQVMEPNQNNWLRTNWISKGNAQRIFVELKFTLRDCNSLPGVLGTCKETFNLYYYETDYDTGRNIRENLYVKIDTIAADESFTQGDLGERKMKLNTEVREIGPLSKKGFYLAFQDVGACIALVSVKVYYKKCWSIIENLAIFPDTVTGSEFSSLVEVRGTCVSSAEEEAENAPRMHCSAEGEWLVPIGKCICKAGYQQKGDTCEPCGRGFYKSSSQDLQCSRCPTHSFSDKEGSSRCECEDGYYRAPSDPPYVACTRPPSAPQNLIFNINQTTVSLEWSPPADNGGRNDVTYRILCKRCSWEQGECVPCGSNIGYMPQQTGLEDNYVTVMDLLAHANYTFEVEAVNGVSDLSRSQRLFAAVSITTGQAAPSQVSGVMKERVLQRSVELSWQEPEHPNGVITEYEIKYYEKDQRERTYSTVKTKSTSASINNLKPGTVYVFQIRAFTAAGYGNYSPRLDVATLEEATGKMFEATAVSSEQNPVIIIAVVAVAGTIILVFMVFGFIIGRRHCGYSKADQEGDEELYFHFKFPGTKTYIDPETYEDPNRAVHQFAKELDASCIKIERVIGAGEFGEVCSGRLKLPGKRDVAVAIKTLKVGYTEKQRRDFLCEASIMGQFDHPNVVHLEGVVTRGKPVMIVIEFMENGALDAFLRKHDGQFTVIQLVGMLRGIAAGMRYLADMGYVHRDLAARNILVNSNLVCKVSDFGLSRVIEDDPEAVYTTTGGKIPVRWTAPEAIQYRKFTSASDVWSYGIVMWEVMSYGERPYWDMSNQDVIKAIEEGYRLPAPMDCPAGLHQLMLDCWQKERAERPKFEQIVGILDKMIRNPNSLKTPLGTCSRPISPLLDQNTPDFTTFCSVGEWLQAIKMERYKDNFTAAGYNSLESVARMTIEDVMSLGITLVGHQKKIMSSIQTMRAQMLHLHGTGIQVXYAFLPFKGDYRLQENSTGLQYMHRMLLEDK

SEQ ID NO: 1425 - protein, 520 aa, Homo Sapiens
  misc_feature (509)..(509): Xaa can be any naturally occurring amino acid
MDHLGASLWPQVGSLCLLLAGAAWAPPPNLPDPKFESKAALLAARGPEELLCFTERLEDLVCFWEEAASAGVGPGNYSFSYQLEDEPWKLCRLHQAPTARGAVRFWCSLPTADTSSFVPLELRVTAASGAPRYHRVIHINEVVLLDAPVGLVARLADESGHVVLRWLPPPETPMTSHIRYEVDVSAGNGAGSVQRVEILEGRTECVLSNLRGRTRYTFAVRARMAEPSFGGFWSAWSEPVSLLTPSDLDPLILTLSLILVVILVLLTVLALLSHRRALKQKIWPGIPSPESEFEGLFTTHKGNFQLWLYQNDGCLWWSPCTPFTEDPPASLEVLSERCWGTMQAVEPGTDDEGPLLEPVGSEHAQDTYLVLDKWLLPRNPPSEDLPGPGGSVDIVAMDEGSEASSCSSALASKPSPEGASAASFEYTILDPSSQLLRPWTLCPELPPTPPHLKYLYLVVSDSGISTDYSSGDSQGAQGGLSDGPYSNPYENSLIPAAEPLPPSYVACSXDTRLQMIRDPI

SEQ ID NO: 1426 - protein, 1265 aa, Homo Sapiens
  misc_feature (1256)..(1256): Xaa can be any naturally occurring amino acid
MELAALCRWGLLLALLPPGAASTQVCTGTDMKLRLPASPETHLDMLRHLYQGCQVVQGNLELTYLPTNASLSFLQDIQEVQGYVLIAHNQVRQVPLQRLRIVRGTQLFEDNYALAVLDNGDPLNNTTPVTGASPGGLRELQLRSLTEILKGGVLIQRNPQLCYQDTILWKDIFHKNNQLALTLIDTNRSRACHPCSPMCKGSRCWGESSEDCQSLTRTVCAGGCARCKGPLPTDCCHEQCAAGCTGPKHSDCLACLHFNHSGICELHCPALVTYNTDTFESMPNPEGRYTFGASCVTACPYNYLSTDVGSCTLVCPLHNQEVTAEDGTQRCEKCSKPCARVCYGLGMEHLREVRAVTSANIQEFAGCKKIFGSLAFLPESFDGDPASNTAPLQPEQLQVFETLEEITGYLYISAWPDSLPDLSVFQNLQVIRGRILHNGAYSLTLQGLGISWLGLRSLRELGSGLALIHHNTHLCFVHTVPWDQLFRNPHQALLHTANRPEDECVGEGLACHQLCARGHCWGPGPTQCVNCSQFLRGQECVEECRVLQGLPREYVNARHCLPCHPECQPQNGSVTCFGPEADQCVACAHYKDPPFCVARCPSGVKPDLSYMPIWKFPDEEGACQPCPINCTHSCVDLDDKGCPAEQRASPLTSIISAVVGILLVVVLGVVFGILIKRRQQKIRKYTMRRLLQETELVEPLTPSGAMPNQAQMRILKETELRKVKVLGSGAFGTVYKGIWIPDGENVKIPVAIKVLRENTSPKANKEILDEAYVMAGVGSPYVSRLLGICLTSTVQLVTQLMPYGCLLDHVRENRGRLGSQDLLNWCMQIAKGMSYLEDVRLVHRDLAARNVLVKSPNHVKITDFGLARLLDIDETEYHADGGKVPIKWMALESILRRRFTHQSDVWSYGVTVWELMTFGAKPYDGIPAREIPDLLEKGERLPQPPICTIDVYMIMVKCWMIDSECRPRFRELVSEFSRMARDPQRFVVIQNEDLGPASPLDSTFYRSLLEDDDMGDLVDAEEYLVPQQGFFCPDPAPGAGGMVHHRHRSSSTRSGGGDLTLGLEPSEEEAPRSPLAPSEGAGSDVFDGDLGMGAAKGLQSLPTHDPSPLQRYSEDPTVPLPSETDGYVAPLTCSPQPEYVNQPDVRPQPPSPREGPLPAARPAGATLERPKTLSPGKNGVVKDVFAFGGAVENPEYLTPQGGAAPQPHPPPAFSPAFDNLYYWDQDPPERGAPPSTFKGTPTAENPEYLGLDVPVXTRRPSPQKP

SEQ ID NO: 1427 - protein, 502 aa, Homo Sapiens
  misc_feature (485)..(485): Xaa can be any naturally occurring amino acid
MERRMKAGYLDQQVPYTFSSKSPGNGSLREALIGPLGKLMDPGSLPPLDSEDLFQDLSHFQETWLAEAQVPDSDEQFVPDFHSENLAFHSPTTRIKKEPQSPRTDPALSCSRKPPLPYHHGEQCLYSSAYDPPRQIAIKSPAPGALGQSPLQPFPRAEQRNFLRSSGTSQPHPGHGYLGEHSSVFQQPLDICHSFTSQGGGREPLPAPYQHQLSEPCPPYPQQSFKQEYHDPLYEQAGQPAVDQGGVNGHRYPGAGVVIKQEQTDFAYDSDVTGCASMYLHTEGFSGPSPGDGAMGYGYEKPLRPFPDDVCVVPEKFEGDIKQEGVGAFREGPPYQRRGALQLWQFLVALLDDPTNAHFIAWTGRGMEFKLIEPEEVARLWGIQKNRPAMNYDKLSRSLRYYYEKGIMQKVAGERYVYKFVCEPEALFSLAFPDNQRPALKAEFDRPVSEEDTVPLSHLDESPAYLPELAGPAQPFGPKGGYSYXPPAAVPPAAGGCCPVYI

SEQ ID NO: 1428 - protein, 643 aa, Homo Sapiens
  misc_feature (623)..(623): Xaa can be any naturally occurring amino acid
MAHVRGLQLPGCLALAALCSLVHSQHVFLAPQQARSLLQRVRRANTFLEEVRKGNLERECVEETCSYEEAFEALESSTATDVFWAKYTACETARTPRDKLAACLEGNCAEGLGTNYRGHVNITRSGIECQLWRSRYPHKPEINSTTHPGADLQENFCRNPDSSTTGPWCYTTDPTVRRQECSIPVCGQDQVTVAMTPRSEGSSVNLSPPLEQCVPDRGQQYQGRLAVTTHGLPCLAWASAQAKALSKHQDFNSAVQLVENFCRNPDGDEEGVWCYVAGKPGDFGYCDLNYCEEAVEEETGDGLDEDSDRAIEGRTATSEYQTFFNPRTFGSGEADCGLRPLFEKKSLEDKTERELLESYIDGRIVEGSDAEIGMSPWQVMLFRKSPQELLCGASLISDRWVLTAAHCLLYPPWDKNFTENDLLVRIGKHSRTRYERNIEKISMLEKIYIHPRYNWRENLDRDIALMKLKKPVAFSDYIHPVCLPDRETAASLLQAGYKGRVTGWGNLKETWTANVGKGQPSVLQVVNLPIVERPVCKDSTRIRITDNMFCAGYKPDEGKRGDACEGDSGGPFVMKSPFNNRWYQMGIVSWGEGCDRDGKYGFYTHVFRLKKWIQKVIDQFGEXGPLIFWAPGTNPVKELFLCF

SEQ ID NO: 1429 - protein, 310 aa, Homo Sapiens
  misc_feature (296)..(296): Xaa can be any naturally occurring amino acid
METPAWPRVPRPETAVARTLLLGWVFAQVAGASGTTNTVAAYNLTWKSTNFKTILEWEPKPVNQVYTVQISTKSGDWKSKCFYTTDTECDLTDEIVKDVKQTYLARVFSYPAGNVESTGSAGEPLYENSPEFTPYLETNLGQPTIQSFEQVGTKVNVTVEDERTLVRRNNTFLSLRDVFGKDLIYTLYYWKSSSSGKKTAKTNTNEFLIDVDKGENYCFSVQAVIPSRTVNRKSTDSPVECMGQEKGEFREIFYIIGAVVFVVIILVIILAISLHKCRKAGVGQSWKENSPLNVSXRKHCWSYCKCYIAL

SEQ ID NO: 1430 - protein, 136 aa, Homo Sapiens
  misc_feature (128)..(128): Xaa can be any naturally occurring amino acid
MSFSGKYQLQSQENFEAFMKAIGLPEELIQKGKDIKGVSEIVQNGKHFKFTITAGSKVIQNEFTVGEECELETMTGEKVKTVVQLEGDNKLVTTFKNIKSVTELNGDIITNTMTLGDIVFKRISKRIXTSLHFILF

SEQ ID NO: 1431 - protein, 344 aa, Homo Sapiens
  misc_feature (336)..(336): Xaa can be any naturally occurring amino acid
MLGIWTLLPLVLTSVARLSSKSVNAQVTDINSKGLELRKTVTTVETQNLEGLHHDGQFCHKPCPPGERKARDCTVNGDEPDCVPCQEGKEYTDKAHFSSKCRRCRLCDEGHGLEVEINCTRTQNTKCRCKPNFFCNSTVCEHCDPCTKCEHGIIKECTLTSNTKCKEEGSRSNLGWLCLLLLPIPLIVWVKRKEVQKTCRKHRKENQGSHESPTLNPETVAINLSDVDLSKYITTIAGVMTLSQVKGFVRKNGVNEAKIDEIKNDNVQDTAEQKVQLLRNWHQLHGKKEAYDTLIKDLKKANLCTLAEKIQTIILKDITSDSENSNFRNEIQSLVXSEKQQIQF

SEQ ID NO: 1432 - protein, 323 aa, Homo Sapiens
  misc_feature (315)..(315): Xaa can be any naturally occurring amino acid
MLGIWTLLPLVLTSVARLSSKSVNAQVTDINSKGLELRKTVTTVETQNLEGLHHDGQFCHKPCPPGERKARDCTVNGDEPDCVPCQEGKEYTDKAHFSSKCRRCRLCDEGHGLEVEINCTRTQNTKCRCKPNFFCNSTVCEHCDPCTKCEHGIIKECTLTSNTKCKEEVKRKEVQKTCRKHRKENQGSHESPTLNPETVAINLSDVDLSKYITTIAGVMTLSQVKGFVRKNGVNEAKIDEIKNDNVQDTAEQKVQLLRNWHQLHGKKEAYDTLIKDLKKANLCTLAEKIQTIILKDITSDSENSNFRNEIQSLVXSEKQQIQF

SEQ ID NO: 1433 - protein, 153 aa, Homo Sapiens
  misc_feature (150)..(150): Xaa can be any naturally occurring amino acid
MLGIWTLLPLVLTSVARLSSKSVNAQVTDINSKGLELRKTVTTVETQNLEGLHHDGQFCHKPCPPGERKARDCTVNGDEPDCVPCQEGKEYTDKAHFSSKCRRCRLCDEGHDVNMESSRNAHSPATPSAKRKDPDLTWGGFVFFFCQFHXLFG

SEQ ID NO: 1434 - protein, 271 aa, Homo Sapiens
  misc_feature (150)..(150): Xaa can be any naturally occurring amino acid
MLGIWTLLPLVLTSVARLSSKSVNAQVTDINSKGLELRKTVTTVETQNLEGLHHDGQFCHKPCPPGERKARDCTVNGDEPDCVPCQEGKEYTDKAHFSSKCRRCRLCDEGHDVNMESSRNAHSPATPSAKRKDPDLTWGGFVFFFCQFHXLFGETVAINLSDVDLSKYITTIAGVMTLSQVKGFVRKNGVNEAKIDEIKNDNVQDTAEQKVQLLRNWHQLHGKKEAYDTLIKDLKKANLCTLAEKIQTIILKDITSDSENSNFRNEIQSLV

SEQ ID NO: 1435 - protein, 157 aa, Homo Sapiens
  misc_feature (133)..(133): Xaa can be any naturally occurring amino acid
MLGIWTLLPLVLTSVARLSSKSVNAQVTDINSKGLELRKTVTTVETQNLEGLHHDGQFCHKPCPPGERKARDCTVNGDEPDCVPCQEGKEYTDKAHFSSKCRRCRLCDEGHDVNMESSRNAHSPATPSAKRKXRERKYRKHAESTERKTKVLMNLQP

SEQ ID NO: 1436 - protein, 111 aa, Homo Sapiens
  misc_feature (87)..(87): Xaa can be any naturally occurring amino acid
MLGIWTLLPLVLTSVARLSSKSVNAQVTDINSKGLELRKTVTTVETQNLEGLHHDGQFCHKPCPPDVNMESSRNAHSPATPSAKRKXRERKYRKHAESTERKTKVLMNLQP

SEQ ID NO: 1437 - protein, 107 aa, Homo Sapiens
  misc_feature (104)..(104): Xaa can be any naturally occurring amino acid
MLGIWTLLPLVLTSVARLSSKSVNAQVTDINSKGLELRKTVTTVETQNLEGLHHDGQFCHKPCPPDVNMESSRNAHSPATPSAKRKDPDLTWGGFVFFFCQFHXLFG

SEQ ID NO: 1438 - protein, 304 aa, Homo Sapiens
  misc_feature (282)..(282): Xaa can be any naturally occurring amino acid
MQQPFNYPYPQIYWVDSSASSPWAPPGTVLPCPTSVPRRPGQRRPPPPPPPPPLPPPPPPPPLPPLPLPPLKKRGNHSTGLCLLVMFFMVLVALVGLGLGMFQLFHLQKELAELRESTSQMHTASSLEKQIGHPSPPPEKKELRKVAHLTGKSNSRSMPLEWEDTYGIVLLSGVKYKKGGLVINETGLYFVYSKVYFRGQSCNNLPLSHKVYMRNSKYPQDLVMMEGKMMSYCTTGQMWARSSYLGAVFNLTSADHLYVNVSELSLVNFEESQTFFGLYKLXEKHFGILSIMILCYRHRECCIQ

SEQ ID NO: 1439 - protein, 350 aa, Homo Sapiens
  misc_feature (322)..(322): Xaa can be any naturally occurring amino acid
MEEGQYSEIEELPRRRCCRRGTQIVLLGLVTAALWAGLLTLLLLWHWDTTQSLKQLEERAARNVSQVSKNLESHHGDQMAQKSQSTQISQELEELRAEQQRLKSQDLELSWNLNGLQADLSSFKSQELNERNEASDLLERLREEVTKLRMELQVSSGFVCNTCPEKWINFQRKCYYFGKGTKQWVHARYACDDMEGQLVSIHSPEEQDFLTKHASHTGSWIGLRNLDLKGEFIWVDGSHVDYSNWAPGEPTSRSQGEDCVMMRGSGRWNDAFCDRKLGAWVCDRLATCTPPASEGSAESMGPDSRPDPDGRLPTPSAPLHSXAWIQPGPEQDPEDPQPRPKSLFVAERSL

SEQ ID NO: 1440 - protein, 848 aa, Homo Sapiens
  misc_feature (823)..(823): Xaa can be any naturally occurring amino acid
MGFSSELCSPQGHGVLQQMQEAELRLLEGMRKWMAQRVKSDREYAGLLHHMSLQDSGGQSRAISPDSPISQSWAEITSQTEGLSRLLRQHAEDLNSGPLSKLSLLIRERQQLRKTYSEQWQQLQQELTKTHSQDIEKLKSQYRALARDSAQAKRKYQEASKDKDRDKAKDKYVRSLWKLFAHHNRYVLGVRAAQLHHQHHHQLLLPGLLRSLQDLHEEMACILKEILQEYLEISSLVQDEVVAIHREMAAAAARIQPEAEYQGFLRQYGSAPDVPPCVTFDESLLEEGEPLEPGELQLNELTVESVQHTLTSVTDELAVATEMVFRRQEMVTQLQQELRNEEENTHPRERVQLLGKRQVLQEALQGLQVALCSQAKLQAQQELLQTKLEHLGPGEPPPVLLLQDDRHSTSSSEQEREGGRTPTLEILKSHISGIFRPKFSLPPPLQLIPEVQKPLHEQLWYHGAIPRAEVAELLVHSGDFLVRESQGKQEYVLSVLWDGLPRHFIIQSLDNLYRLEGEGFPSIPLLIDHLLSTQQPLTKKSGVVLHRAVPKDKWVLNHEDLVLGEQIGRGNFGEVFSGRLRADNTLVAVKSCRETLPPDLKAKFLQEARILKQYSHPNIVRLIGVCTQKQPIYIVMELVQGGDFLTFLRTEGARLRVKTLLQMVGDAAAGMEYLESKCCIHRDLAARNCLVTEKNVLKISDFGMSREEADGVYAASGGLRQVPVKWTAPEALNYGRYSSESDVWSFGILLWETFSLGASPYPNLSNQQTREFVEKGGRLPCPELCPDAVFRLMEQCWAYEPGQRPSFSTIYQELQSIRKRHRXGWDPLLKLVASAGLGAAPQRLQLIC

SEQ ID NO: 1441 - protein, 880 aa, Homo Sapiens
  misc_feature (867)..(867): Xaa can be any naturally occurring amino acid
MFSMRIVCLVLSVVGTAWTADSGEGDFLAEGGGVRGPRVVERHQSACKDSDWPFCSDEDWNYKCPSGCRMKGLIDEVNQDFTNRINKLKNSLFEYQKNNKDSHSLTTNIMEILRGDFSSANNRDNTYNRVSEDLRSRIEVLKRKVIEKVQHIQLLQKNVRAQLVDMKRLEVDIDIKIRSCRGSCSRALAREVDLKDYEDQQKQLEQVIAKDLLPSRDRQHLPLIKMKPVPDLVPGNFKSQLQKVPPEWKALTDMPQMRMELERPGGNEITRGGSTSYGTGSETESPRNPSSAGSWNSGSSGPGSTGNRNPGSSGTGGTATWKPGSSGPGSTGSWNSGSSGTGSTGNQNPGSPRPGSTGTWNPGSSERGSAGHWTSESSVSGSTGQWHSESGSFRPDSPGSGNARPNNPDWGTFEEVSGNVSPGTRREYHTEKLVTSKGDKELRTGKEKVTSGSTTTTRRSCSKTVTKTVIGPDGHKEVTKEVVTSEDGSDCPEAMDLGTLSGIGTLDGFRHRHPDEAAFFDTASTGKTFPGFFSPMLGEFVSETESRGSESGIFTNTKESSSHHPGIAEFPSRGKSSSYSKQFTSSTSYNRGDSTFESKSYKMADEAGSEADHEGTHSTKRGHAKSRPVRDCDDVLQTHPSGTQSGIFNIKLPGSSKIFSVYCDQETSLGGWLLIQQRMDGSLNFNRTWQDYKRGFGSLNDEGEGEFWLGNDYLHLLTQRGSVLRVELEDWAGNEAYAEYHFRVGSEAEGYALQVSSYEGTAGDALIEGSVEEGAEYTSHNNMQFSTFDRDADQWEENCAEVYGGGWWYNNCQAANLNGIYYPGGSYDPRNNSPYEIENGVVWVSFRGADYSLRAVRMKIRPLVTQXAEEVGMGALCLLC

SEQ ID NO: 1442 - protein, 701 aa, Homo Sapiens
  misc_feature (645)..(645): Xaa can be any naturally occurring amino acid
MFSMRIVCLVLSVVGTAWTADSGEGDFLAEGGGVRGPRVVERHQSACKDSDWPFCSDEDWNYKCPSGCRMKGLIDEVNQDFTNRINKLKNSLFEYQKNNKDSHSLTTNIMEILRGDFSSANNRDNTYNRVSEDLRSRIEVLKRKVIEKVQHIQLLQKNVRAQLVDMKRLEVDIDIKIRSCRGSCSRALAREVDLKDYEDQQKQLEQVIAKDLLPSRDRQHLPLIKMKPVPDLVPGNFKSQLQKVPPEWKALTDMPQMRMELERPGGNEITRGGSTSYGTGSETESPRNPSSAGSWNSGSSGPGSTGNRNPGSSGTGGTATWKPGSSGPGSTGSWNSGSSGTGSTGNQNPGSPRPGSTGTWNPGSSERGSAGHWTSESSVSGSTGQWHSESGSFRPDSPGSGNARPNNPDWGTFEEVSGNVSPGTRREYHTEKLVTSKGDKELRTGKEKVTSGSTTTTRRSCSKTVTKTVIGPDGHKEVTKEVVTSEDGSDCPEAMDLGTLSGIGTLDGFRHRHPDEAAFFDTASTGKTFPGFFSPMLGEFVSETESRGSESGIFTNTKESSSHHPGIAEFPSRGKSSSYSKQFTSSTSYNRGDSTFESKSYKMADEAGSEADHEGTHSTKRGHAKSRPVRGIHTSPLGKPSLSPXTKLNISAQCSHGPLHFLLNSLLHVIETTLFWSVFVLDCKFLGGRAFVCLISVFPNA

SEQ ID NO: 1443 - protein, 503 aa, Homo Sapiens
  misc_feature (492)..(492): Xaa can be any naturally occurring amino acid
MKRMVSWSFHKLKTMKHLLLLLLCVFLVKSQGVNDNEEGFFSARGHRPLDKKREEAPSLRPAPPPISGGGYRARPAKAAATQKKVERKAPDAGGCLHADPDLGVLCPTGCQLQEALLQQERPIRNSVDELNNNVEAVSQTSSSSFQYMYLLKDLWQKRQKQVKDNENVVNEYSSELEKHQLYIDETVNSNIPTNLRVLRSILENLRSKIQKLESDVSAQMEYCRTPCTVSCNIPVVSGKECEEIIRKGGETSEMYLIQPDSSVKPYRVYCDMNTENGGWTVIQNRQDGSVDFGRKWDPYKQGFGNVATNTDGKNYCGLPGEYWLGNDKISQLTRMGPTELLIEMEDWKGDKVKAHYGGFTVQNEANKYQISVNKYRGTAGNALMDGASQLMGENRTMTIHNGMFFSTYDRDNDGWLTSDPRKQCSKEDGGGWWYNRCHAANPNGRYYWGGQYTWDMAKHGTDDGVVWMNWKGSWYSMRKMSMKIRPFFPQQXSPIRRFLLFCM

SEQ ID NO: 1444 - protein, 457 aa, Homo Sapiens
  misc_feature (438)..(438): Xaa can be any naturally occurring amino acid
MSWSLHPRNLILYFYALLFLSSTCVAYVATRDNCCILDERFGSYCPTTCGIADFLSTYQTKVDKDLQSLEDILHQVENKTSEVKQLIKAIQLTYNPDESSKPNMIDAATLKSRKMLEEIMKYEASILTHDSSIRYLQEIYNSNNQKIVNLKEKVAQLEAQCQEPCKDTVQIHDITGKDCQDIANKGAKQSGLYFIKPLKANQQFLVYCEIDGSGNGWTVFQKRLDGSVDFKKNWIQYKEGFGHLSPTGTTEFWLGNEKIHLISTQSAIPYALRVELEDWNGRTSTADYAMFKVGPEADKYRLTYAYFAGGDAGDAFDGFDFGDDPSDKFFTSHNGMQFSTWDNDNDKFEGNCAEQDGSGWWMNKCHAGHLNGVYYQGGTYSKASTPNGYDNGIIWATWKTRWYSMKKTTMKIIPFNRLTIGEGQQHHLGGAKQAGDVXKTVSKEIYFFKGLYLNREI

SEQ ID NO: 1445 - protein, 458 aa, Homo Sapiens
  misc_feature (454)..(454): Xaa can be any naturally occurring amino acid
MSWSLHPRNLILYFYALLFLSSTCVAYVATRDNCCILDERFGSYCPTTCGIADFLSTYQTKVDKDLQSLEDILHQVENKTSEVKQLIKAIQLTYNPDESSKPNMIDAATLKSRKMLEEIMKYEASILTHDSSIRYLQEIYNSNNQKIVNLKEKVAQLEAQCQEPCKDTVQIHDITGKDCQDIANKGAKQSGLYFIKPLKANQQFLVYCEIDGSGNGWTVFQKRLDGSVDFKKNWIQYKEGFGHLSPTGTTEFWLGNEKIHLISTQSAIPYALRVELEDWNGRTSTADYAMFKVGPEADKYRLTYAYFAGGDAGDAFDGFDFGDDPSDKFFTSHNGMQFSTWDNDNDKFEGNCAEQDGSGWWMNKCHAGHLNGVYYQGGTYSKASTPNGYDNGIIWATWKTRWYSMKKTTMKIIPFNRLTIGEGQQHHLGGAKQVRPEHPAETEYDSLYPEDDLXKINC

SEQ ID NO: 1446 - protein, 487 aa, Homo Sapiens
  misc_feature (458)..(458): Xaa can be any naturally occurring amino acid
MTTDEGAKNNEESPTATVAEQGEDITSKKDRGVLKIVKRVGNGEETPMIGDKVYVHYKGKLSNGKKFDSSHDRNEPFVFSLGKGQVIKAWDIGVATMKKGEICHLLCKPEYAYGSAGSLPKIPSNATLFFEIELLDFKGEDLFEDGGIIRRTKRKGEGYSNPNEGATVEIHLEGRCGGRMFDCRDVAFTVGEGEDHDIPIGIDKALEKMQREEQCILYLGPRYGFGEAGKPKFGIEPNAELIYEVTLKSFEKAKESWEMDTKEKLEQAAIVKEKGTVYFKGGKYMQAVIQYGKIVSWLEMEYGLSEKESKASESFLLAAFLNLAMCYLKLREYTKAVECCDKALGLDSANEKGLYRRGEAQLLMNEFESAKGDFEKVLEVNPQNKAARLQISMCQKKAKEHNERDRRIYANMFKKFAEQDAKEEANKAMGKKTSEGVTNEKGTDSQAMEEEKPEGHVXRHAKEGRVPVNSAPPQWAFPQLRTEQCLM

SEQ ID NO: 1447 - protein, 1358 aa, Homo Sapiens
  misc_feature (1339)..(1339): Xaa can be any naturally occurring amino acid
MVSYWDTGVLLCALLSCLLLTGSSSGSKLKDPELSLKGTQHIMQAGQTLHLQCRGEAAHKWSLPEMVSKESERLSITKSACGRNGKQFCSTLTLNTAQANHTGFYSCKYLAVPTSKKKETESAIYIFISDTGRPFVEMYSEIPEIIHMTEGRELVIPCRVTSPNITVTLKKFPLDTLIPDGKRIIWDSRKGFIISNATYKEIGLLTCEATVNGHLYKTNYLTHRQTNTIIDVQISTPRPVKLLRGHTLVLNCTATTPLNTRVQMTWSYPDEKNKRASVRRRIDQSNSHANIFYSVLTIDKMQNKDKGLYTCRVRSGPSFKSVNTSVHIYDKAFITVKHRKQQVLETVAGKRSYRLSMKVKAFPSPEVVWLKDGLPATEKSARYLTRGYSLIIKDVTEEDAGNYTILLSIKQSNVFKNLTATLIVNVKPQIYEKAVSSFPDPALYPLGSRQILTCTAYGIPQPTIKWFWHPCNHNHSEARCDFCSNNEESFILDADSNMGNRIESITQRMAIIEGKNKMASTLVVADSRISGIYICIASNKVGTVGRNISFYITDVPNGFHVNLEKMPTEGEDLKLSCTVNKFLYRDVTWILLRTVNNRTMHYSISKQKMAITKEHSITLNLTIMNVSLQDSGTYACRARNVYTGEEILQKKEITIRDQEAPYLLRNLSDHTVAISSSTTLDCHANGVPEPQITWFKNNHKIQQEPGIILGPGSSTLFIERVTEEDEGVYHCKATNQKGSVESSAYLTVQGTSDKSNLELITLTCTCVAATLFWLLLTLFIRKMKRSSSEIKTDYLSIIMDPDEVPLDEQCERLPYDASKWEFARERLKLGKSLGRGAFGKVVQASAFGIKKSPTCRTVAVKMLKEGATASEYKALMTELKILTHIGHHLNVVNLLGACTKQGGPLMVIVEYCKYGNLSNYLKSKRDLFFLNKDAALHMEPKKEKMEPGLEQGKKPRLDSVTSSESFASSGFQEDKSLSDVEEEEDSDGFYKEPITMEDLISYSFQVARGMEFLSSRKCIHRDLAARNILLSENNVVKICDFGLARDIYKNPDYVRKGDTRLPLKWMAPESIFDKIYSTKSDVWSYGVLLWEIFSLGGSPYPGVQMDEDFCSRLREGMRMRAPEYSTPEIYQIMLDCWHRDPKERPRFAELVEKLGDLLQANVQQDGKDYIPINAILTGNSGFTYSTPAFSEDFFKESISAPKFNSGSSDDVRYVNAFKFMSLERIKTFEELLPNATSMFDDYQGDSSTLLASPMLKRFTWTDSKPKASLKIDLRVTSKSKESGLSDVSRPSFCHSSCGHVSEGKRRFTYDHAELERKIACCSPPPDYNSVVLYSTPPIXSLTRSLISRSTCVFIPPGN

SEQ ID NO: 1448 - protein, 1317 aa, Homo Sapiens
  misc_feature (1299)..(1299): Xaa can be any naturally occurring amino acid
MQRGAALCLRLWLCLGLLDGLVSGYSMTPPTLNITEESHVIDTGDSLSISCRGQHPLEWAWPGAQEAPATGDKDSEDTGVVRDCEGTDARPYCKVLLLHEVHANDTGSYVCYYKYIKARIEGTTAASSYVFVRDFEQPFINKPDTLLVNRKDAMWVPCLVSIPGLNVTLRSQSSVLWPDGQEVVWDDRRGMLVSTPLLHDALYLQCETTWGDQDFLSNPFLVHITGNELYDIQLLPRKSLELLVGEKLVLNCTVWAEFNSGVTFDWDYPGKQAERGKWVPERRSQQTHTELSSILTIHNVSQHDLGSYVCKANNGIQRFRESTEVIVHENPFISVEWLKGPILEATAGDELVKLPVKLAAYPPPEFQWYKDGKALSGRHSPHALVLKEVTEASTGTYTLALWNSAAGLRRNISLELVVNVPPQIHEKEASSPSIYSRHSRQALTCTAYGVPLPLSIQWHWRPWTPCKMFAQRSLRRRQQQDLMPQCRDWRAVTTQDAVNPIESLDTWTEFVEGKNKTVSKLVIQNANVSAMYKCVVSNKVGQDERLIYFYVTTIPDGFTIESKPSEELLEGQPVLLSCQADSYKYEHLRWYRLNLSTLHDAHGNPLLLDCKNVHLFATPLAASLEEVAPGARHATLSLSIPRVAPEHEGHYVCEVQDRRSHDKHCHKKYLSVQALEAPRLTQNLTDLLVNVSDSLEMQCLVAGAHAPSIVWYKDERLLEEKSGVDLADSNQKLSIQRVREEDAGRYLCSVCNAKGCVNSSASVAVEGSEDKGSMEIVILVGTGVIAVFFWVLLLLIFCNMRRPAHADIKTGYLSIIMDPGEVPLEEQCEYLSYDASQWEFPRERLHLGRVLGYGAFGKVVEASAFGIHKGSSCDTVAVKMLKEGATASEHRALMSELKILIHIGNHLNVVNLLGACTKPQGPLMVIVEFCKYGNLSNFLRAKRDAFSPCAEKSPEQRGRFRAMVELARLDRRRPGSSDRVLFARFSKTEGGARRASPDQEAEDLWLSPLTMEDLVCYSFQVARGMEFLASRKCIHRDLAARNILLSESDVVKICDFGLARDIYKDPDYVRKGSARLPLKWMAPESIFDKVYTTQSDVWSFGVLLWEIFSLGASPYPGVQINEEFCQRLRDGTRMRAPELATPAIRRIMLNCWSGDPKARPAFSELVEILGDLLQGRGLQEEEEVCMAPRSSQSSEEGSFSQVSTMALHIAQADAEDSPPSLQRHSLAARYYNWVSFPGCLARGAETRGSSRMKTFEEFPMTPTTYKGSVDNQTDSGMVLASEEFEQIESRHRQESGFRXLKQRERRQHTSAFSSLHL

SEQ ID NO: 1449 - protein, 759 aa, Homo Sapiens
  misc_feature (751)..(751): Xaa can be any naturally occurring amino acid
MWNLLHETDSAVATARRPRWLCAGALVLAGGFFLLGFLFGWFIKSSNEATNITPKHNMKAFLDELKAENIKKFLYNFTQIPHLAGTEQNFQLAKQIQSQWKEFGLDSVELAHYDVLLSYPNKTHPNYISIINEDGNEIFNTSLFEPPPPGYENVSDIVPPFSAFSPQGMPEGDLVYVNYARTEDFFKLERDMKINCSGKIVIARYGKVFRGNKVKNAQLAGAKGVILYSDPADYFAPGVKSYPDGWNLPGGGVQRGNILNLNGAGDPLTPGYPANEYAYRRGIAEAVGLPSIPVHPIGYYDAQKLLEKMGGSAPPDSSWRGSLKVPYNVGPGFTGNFSTQKVKMHIHSTNEVTRIYNVIGTLRGAVEPDRYVILGGHRDSWVFGGIDPQSGAAVVHEIVRSFGTLKKEGWRPRRTILFASWDAEEFGLLGSTEWAEENSRLLQERGVAYINADSSIEGNYTLRVDCTPLMYSLVHNLTKELKSPDEGFEGKSLYESWTKKSPSPEFSGMPRISKLGSGNDFEVFFQRLGIASGRARYTKNWETNKFSGYPLYHSVYETYELVEKFYDPMFKYHLTVAQVRGGMVFELANSIVLPFDCRDYAVVLRKYADKIYSISMKHPQEMKTYSVSFDSLFSAVKNFTEIASKFSERLQDFDKSNPIVLRMMNDQLMFLERAFIDPLGLPDRPFYRHVIYAPSSHNKYAGESFPGIYDALFDIESKVDPSKAWGEVKRQIYVAAFTVQAAAETLSEVAXEDSLENPY

SEQ ID NO: 1450 - protein, 142 aa, Homo Sapiens
  misc_feature (130)..(130): Xaa can be any naturally occurring amino acid
MKTLQFFFLFCCWKAICCNSCELTNITIAIEKEECRFCISINTTWCAGYCYTRDLVYKDPARPKIQKTCTFKELVYETVRVPGCAHHADSLYTYPVATQCHCGKCDSDSTDCTVRGLGPSYCSFGEMKEXRSVDISGHIPLS

SEQ ID NO: 1451 - protein, 187 aa, Homo Sapiens
  misc_feature (184)..(184): Xaa can be any naturally occurring amino acid
MTTASTSQVRQNYHQDSEAAINRQINLELYASYVYLSMSYYFDRDDVALKNFAKYFLHQSHEEREHAEKLMKLQNQRGGRIFLQDIKKPDCDDWESGLNAMECALHLEKNVNQSLLELHKLATDKNDPHLCDFIETHYLNEQVKAIKELGDHVTNLRKMGAPESGLAEYLFDKHTLGDSDNESXASG

SEQ ID NO: 1452 - protein, 184 aa, Homo Sapiens
  misc_feature (176)..(176): Xaa can be any naturally occurring amino acid
MSSQIRQNYSTDVEAAVNSLVNLYLQASYTYLSLGFYFDRDDVALEGVSHFFRELAEEKREGYERLLKMQNQRGGRALFQDIKKPAEDEWGKTPDAMKAAMALEKKLNQALLDLHALGSARTDPHLCDFLETHFLDEEVKLIKKMGDHLTNLHRLGGPEAGLGEYLFERLTLKHDXEPSEPSDF

SEQ ID NO: 1453 - protein, 593 aa, Homo Sapiens
  misc_feature (516)..(516): Xaa can be any naturally occurring amino acid
MAEQVALSRTQVCGILREELFQGDAFHQSDTHIFIIMGASGDLAKKKIYPTIWWLFRDGLLPENTFIVGYARSRLTVADIRKQSEPFFKATPEEKLKLEDFFARNSYVAGQYDDAASYQRLNSHMNALHLGSQANRLFYLALPPTVYEAVTKNIHESCMSQIGWNRIIVEKPFGRDLQSSDRLSNHISSLFREDQIYRIDHYLGKEMVQNLMVLRFANRIFGPIWNRDNIACVILTFKEPFGTEGRGGYFDEFGIIRDVMQNHLLQMLCLVAMEKPASTNSDDVRDEKVKVLKCISEVQANNVVLGQYVGNPDGEGEATKGYLDDPTVPRGSTTATFAAVVLYVENERWDGVPFILRCGKALNERKAEVRLQFHDVAGDIFHQQCKRNELVIRVQPNEAVYTKMMTKKPGMFFNPEESELDLTYGNRYKNVKLPDAYERLILDVFCGSQMHFVRSDELREAWRIFTPLLHQIELEKPKPIPYIYGSRGPTEADELMKRVGFQYEGTYKWVNPHKLXALGTHLHPRHGHPPSRRPTPSREDSGTIDLSCTFLAPGSGHPGPPLAAATTRAQLHSSAAKHSRPSWPLQTLPEPRS

SEQ ID NO: 1454 - protein, 599 aa, Homo Sapiens
  misc_feature (581)..(581): Xaa can be any naturally occurring amino acid
MAGTVRTACLVVAMLLSLDFPGQAQPPPPPPDATCHQVRSFFQRLQPGLKWVPETPVPGSDLQVCLPKGPTCCSRKMEEKYQLTARLNMEQLLQSASMELKFLIIQNAAVFQEAFEIVVRHAKNYTNAMFKNNYPSLTPQAFEFVGEFFTDVSLYILGSDINVDDMVNELFDSLFPVIYTQLMNPGLPDSALDINECLRGARRDLKVFGNFPKLIMTQVSKSLQVTRIFLQALNLGIEVINTTDHLKFSKDCGRMLTRMWYCSYCQGLMMVKPCGGYCNVVMQGCMAGVVEIDKYWREYILSLEELVNGMYRIYDMENVLLGLFSTIHDSIQYVQKNAGKLTTTIGKLCAHSQQRQYRSAYYPEDLFIDKKVLKVAHVEHEETLSSRRRELIQKLKSFISFYSALPGYICSHSPVAENDTLCWNGQELVERYSQKAARNGMKNQFNLHELKMKGPEPVVSQIIDKLKHINQLLRTMSMPKGRVLDKNLDEEGFESGDCGDDEDECIGGSGDGMIKVKNQLRFLAELAYDLDVDDAPGNSQQATPKDNEISTFHNLGNVHSPLKLLTSMAISVVCFFFLVHXLPGAQHMCCPTAPCGLPR

SEQ ID NO: 1455 - protein, 252 aa, Homo Sapiens
  misc_feature (203)..(203): Xaa can be any naturally occurring amino acid
MCAARLAAAAAAAQSVYAFSARPLAGGEPVSLGSLRGKVLLIENVASLGTTVRDYTQMNELQRRLGPRGLVVLGFPCNQFGHQENAKNEEILNSLKYVRPGGGFEPNFMLFEKCEVNGAGAHPLFAFLREALPAPSDDATALMTDPKLITWSPVCRNDVAWNFEKFLVGPDGVPLRRYSRRFQTIDIEPDIEALLSQGPSCAXGAPPTPAAWQLQCCCLGGVFIYEGVSSKPTREEHLILQKIPPRDGCWSC

SEQ ID NO: 1456 - protein, 814 aa, Homo Sapiens
  misc_feature (783)..(783): Xaa can be any naturally occurring amino acid
MAPHRPAPALLCALSLALCALSLPVRAATASRGASQAGAPQGRVPEARPNSMVVEHPEFLKAGKEPGLQIWRVEKFDLVPVPTNLYGDFFTGDAYVILKTVQLRNGNLQYDLHYWLGNECSQDESGAAAIFTVQLDDYLNGRAVQHREVQGFESATFLGYFKSGLKYKKGGVASGFKHVVPNEVVVQRLFQVKGRRVVRATEVPVSWESFNNGDCFILDLGNNIHQWCGSNSNRYERLKATQVSKGIRDNERSGRARVHVSEEGTEPEAMLQVLGPKPALPAGTEDTAKEDAANRKLAKLYKVSNGAGTMSVSLVADENPFAQGALKSEDCFILDHGKDGKIFVWKGKQANTEERKAALKTASDFITKMDYPKQTQVSVLPEGGETPLFKQFFKNWRDPDQTDGLGLSYLSSHIANVERVPFDAATLHTSTAMAAQHGMDDDGTGQKQIWRIEGSNKVPVDPATYGQFYGGDSYIILYNYRHGGRQGQIIYNWQGAQSTQDEVAASAILTAQLDEELGGTPVQSRVVQGKEPAHLMSLFGGKPMIIYKGGTSREGGQTAPASTRLFQVRANSAGATRAVEVLPKAGALNSNDAFVLKTPSAAYLWVGTGASEAEKTGAQELLRVLRAQPVQVAEGSEPDGFWEALGGKAAYRTSPRLKDKKMDAHPPRLFACSNKIGRFVIEEVPGELMQEDLATDDVMLLDTWDQVFVWVGKDSQEEEKTEALTSAKRYIETDPANRDRRTPITVVKQGFEPPSFVGWFLGWDDDYWSVDPLDRAMAELAAXGGAGPTHVTGQCLLELSFPQRGLRASRAALL

SEQ ID NO: 1457 - protein, 252 aa, Homo Sapiens
  misc_feature (226)..(226): Xaa can be any naturally occurring amino acid
MSCESSMVLGYWDIRGLAHAIRLLLEFTDTSYEEKRYTCGEAPDYDRSQWLDVKFKLDLDFPNLPYLLDGKNKITQSNAILRYIARKHNMCGETEEEKIRVDIIENQVMDFRTQLIRLCYSSDHEKLKPQYLEELPGQLKQFSMFLGKFSWFAGEKLTFVDFLTYDILDQNRIFDPKCLDEFPNLKAFMCRFEALEKIAAYLQSDQFCKMPINNKMAQWGNKPVCXAGGRLAELVLFHPVRKGSALLLCSFQ

SEQ ID NO: 1458 - protein, 311 aa, Homo Sapiens
  misc_feature (291)..(291): Xaa can be any naturally occurring amino acid
MWVTKLLPALLLQHVLLHLLLLPIAIPYAEGQRKRRNTIHEFKKSAKTTLIKIDPALKIKTKKVNTADQCANRCTRNKGLPFTCKAFVFDKARKQCLWFPFNSMSSGVKKEFGHEFDLYENKDYIRNCIIGKGRSYKGTVSITKSGIKCQPWSSMIPHEHSFLPSSYRGKDLQENYCRNPRGEEGGPWCFTSNPEVRYEVCDIPQCSEVECMTCNGESYRGLMDHTESGKICQRWDHQTPHRHKFLPERYPDKGFDDNYCRNPDGQPRPWCYTLDPHTRWEYCAIKTCETXHGLSTDGELLLVSDRGCSEE

SEQ ID NO: 1459 - protein, 306 aa, Homo Sapiens
  misc_feature (286)..(286): Xaa can be any naturally occurring amino acid
MWVTKLLPALLLQHVLLHLLLLPIAIPYAEGQRKRRNTIHEFKKSAKTTLIKIDPALKIKTKKVNTADQCANRCTRNKGLPFTCKAFVFDKARKQCLWFPFNSMSSGVKKEFGHEFDLYENKDYIRNCIIGKGRSYKGTVSITKSGIKCQPWSSMIPHEHSYRGKDLQENYCRNPRGEEGGPWCFTSNPEVRYEVCDIPQCSEVECMTCNGESYRGLMDHTESGKICQRWDHQTPHRHKFLPERYPDKGFDDNYCRNPDGQPRPWCYTLDPHTRWEYCAIKTCETXHGLSTDGELLLVSDRGCSEE

SEQ ID NO: 1460 - protein, 729 aa, Homo Sapiens
  misc_feature (725)..(725): Xaa can be any naturally occurring amino acid
MPEEVHHGEEEVETFAFQAEIAQLMSLIINTFYSNKEIFLRELISNASDALDKIRYESLTDPSKLDSGKELKIDIIPNPQERTLTLVDTGIGMTKADLINNLGTIAKSGTKAFMEALQAGADISMIGQFGVGFYSAYLVAEKVVVITKHNDDEQYAWESSAGGSFTVRADHGEPIGRGTKVILHLKEDQTEYLEERRVKEVVKKHSQFIGYPITLYLEKEREKEISDDEAEEEKGEKEEEDKDDEEKPKIEDVGSDEEDDSGKDKKKKTKKIKEKYIDQEELNKTKPIWTRNPDDITQEEYGEFYKSLTNDWEDHLAVKHFSVEGQLEFRALLFIPRRAPFDLFENKKKKNNIKLYVRRVFIMDSCDELIPEYLNFIRGVVDSEDLPLNISREMLQQSKILKVIRKNIVKKCLELFSELAEDKENYKKFYEAFSKNLKLGIHEDSTNRRRLSELLRYHTSQSGDEMTSLSEYVSRMKETQKSIYYITGESKEQVANSAFVERVRKRGFEVVYMTEPIDEYCVQQLKEFDGKSLVSVTKEGLELPEDEEEKKKMEESKAKFENLCKLMKEILDKKVEKVTISNRLVSSPCCIVTSTYGWTANMERIMKAQALRDNSTMGYMMAKKHLEINPDHPIVETLRQKAEADKNDKAVKDLVVLLFETALLSSGFSLEDPQTHSNRIYRMIKLGLGIDEDEVAAEEPNAAVPDEIPPLEGDEDASRMEEVDXVRSS

SEQ ID NO: 1461 - protein, 834 aa, Homo Sapiens
  misc_feature (804)..(804): Xaa can be any naturally occurring amino acid
MRALWVLGLCCVLLTFGSVRADDEVDVDGTVEEDLGKSREGSRTDDEVVQREEEAIQLDGLNASQIRELREKSEKFAFQAEVNRMMKLIINSLYKNKEIFLRELISNASDALDKIRLISLTDENALSGNEELTVKIKCDKEKNLLHVTDTGVGMTREELVKNLGTIAKSGTSEFLNKMTEAQEDGQSTSELIGQFGVGFYSAFLVADKVIVTSKHNNDTQHIWESDSNEFSVIADPRGNTLGRGTTITLVLKEEASDYLELDTIKNLVKKYSQFINFPIYVWSSKTETVEEPMEEEEAAKEEKEESDDEAAVEEEEEEKKPKTKKVEKTVWDWELMNDIKPIWQRPSKEVEEDEYKAFYKSFSKESDDPMAYIHFTAEGEVTFKSILFVPTSAPRGLFDEYGSKKSDYIKLYVRRVFITDDFHDMMPKYLNFVKGVVDSDDLPLNVSRETLQQHKLLKVIRKKLVRKTLDMIKKIADDKYNDTFWKEFGTNIKLGVIEDHSNRTRLAKLLRFQSSHHPTDITSLDQYVERMKEKQDKIYFMAGSSRKEAESSPFVERLLKKGYEVIYLTEPVDEYCIQALPEFDGKRFQNVAKEGVKFDESEKTKESREAVEKEFEPLLNWMKDKALKDKIEKAVVSQRLTESPCALVASQYGWSGNMERIMKAQAYQTGKDISTNYYASQKKTFEINPRHPLIRDMLRRIKEDEDDKTVLDLAVVLFETATLRSGYLLPDTKAYGDRIERMLRLSLNIDPDAKVEEEPEEEPEETAEDTTEDTEQDEDEEMDVGTDEEEETAKESTAEKDELXIILSPFGSCVERECEIYIISFWERLVLDAP

SEQ ID NO: 1462 - protein, 577 aa, Homo Sapiens
  misc_feature (574)..(574): Xaa can be any naturally occurring amino acid
MLRLPTVFRQMRPVSRVLAPHLTRAYAKDVKFGADARALMLQGVDLLADAVAVTMGPKGRTVIIEQSWGSPKVTKDGVTVAKSIDLKDKYKNIGAKLVQDVANNTNEEAGDGTTTATVLARSIAKEGFEKISKGANPVEIRRGVMLAVDAVIAELKKQSKPVTTPEEIAQVATISANGDKEIGNIISDAMKKVGRKGVITVKDGKTLNDELEIIEGMKFDRGYISPYFINTSKGQKCEFQDAYVLLSEKKISSIQSIVPALEIANAHRKPLVIIAEDVDGEALSTLVLNRLKVGLQVVAVKAPGFGDNRKNQLKDMAIATGGAVFGEEGLTLNLEDVQPHDLGKVGEVIVTKDDAMLLKGKGDKAQIEKRIQEIIEQLDVTTSEYEKEKLNERLAKLSDGVAVLKVGGTSDVEVNEKKDRVTDALNATRAAVEEGIVLGGGCALLRCIPALDSLTPANEDQKIGIEIIKRTLKIPAMTIAKNAGVEGSLIVEKIMQSSSEVGYDAMAGDFVNMVEKGIIDPTKVVRTALLDAAGVASLLTTAEVVVTEIPKEEKDPGMGAMGGMGGGMGGGMFXLLD

SEQ ID NO: 1463 - protein, 602 aa, Homo Sapiens
  misc_feature (533)..(533): Xaa can be any naturally occurring amino acid
MAPSSPRPALPALLVLLGALFPGPGNAQTSVSPSKVILPRGGSVLVTCSTSCDQPKLLGIETPLPKKELLLPGNNRKVYELSNVQEDSQPMCYSNCPDGQSTAKTFLTVYWTPERVELAPLPSWQPVGKNLTLRCQVEGGAPRANLTVVLLRGEKELKREPAVGEPAEVTTTVLVRRDHHGANFSCRTELDLRPQGLELFENTSAPYQLQTFVLPATPPQLVSPRVLEVDTQGTVVCSLDGLFPVSEAQVHLALGDQRLNPTVTYGNDSFSAKASVSVTAEDEGTQRLTCAVILGNQSQETLQTVTIYSFPAPNVILTKPEVSEGTEVTVKCEAHPRAKVTLNGVPAQPLGPRAQLLLKATPEDNGRSFSCSATLEVAGQLIHKNQTRELRVLYGPRLDERDCPGNWTWPENSQQTPMCQAWGNPLPELKCLKDGTFPLPIGESVTVTRDLEGTYLCRARSTQGEVTREVTVNVLSPRYEIVIITVVAAAVIMGTAGLSTYLYNRQRKIKKYRLQQAQKGTPMKPNTQATPPXTYPGTGPLPRPSHIGGSGATLNRVEDICHAATPTGPGTPEDRALSSVRYNSIWGHGTCTPKTLGHASDL

SEQ ID NO: 1464 - protein, 211 aa, Homo Sapiens
  misc_feature (188)..(188): Xaa can be any naturally occurring amino acid
MTNKCLLQIALLLCFSTTALSMSYNLLGFLQRSSNFQCQKLLWQLNGRLEYCLKDRMNFDIPEEIKQLQQFQKEDAALTIYEMLQNIFAIFRQDSSSTGWNETIVENLLANVYHQINHLKTVLEEKLEKEDFTRGKLMSSLHLKRYYGRILHYLKAKEYSHCAWTIVRVEILRNFYFINRLTGYLRNXRSPSLCLWDWTIASSILQPADAV

SEQ ID NO: 1465 - protein, 183 aa, Homo Sapiens
  misc_feature (167)..(167): Xaa can be any naturally occurring amino acid
MKYTSYILAFQLCIVLGSLGCYCQDPYVKEAENLKKYFNAGHSDVADNGTLFLGILKNWKEESDRKIMQSQIVSFYFKLFKNFKDDQSIQKSVETIKEDMNVKFFNSNKKKRDDFEKLTNYSVTDLNVQRKAIHELIQVMAELSPAAKTGKRKRSQMLFRGRRASQXWLSCLQYLNFKSKSIY

SEQ ID NO: 1466 - protein, 160 aa, Homo Sapiens
  misc_feature (154)..(154): Xaa can be any naturally occurring amino acid
MGKISSLPTQLFKCCFCDFLKVKMHTMSSSHLFYLALCLLTFTSSATAGPETLCGAELVDALQFVCGDRGFYFNKPTGYGSSSRRAPQTGIVDECCFRSCDLRRLEMYCAPLKPAKSARSVRAQRHTDMPKTQKEVHLKNASRGSAGNKNYRMXEDPPEE

SEQ ID NO: 1467 - protein, 243 aa, Homo Sapiens
  misc_feature (181)..(181): Xaa can be any naturally occurring amino acid
MGIPMGKSMLVLLTFLAFASCCIAAYRPSETLCGGELVDTLQFVCGDRGFYFSRPASRVSRRSRGIVEECCFRSCDLALLETYCATPAKSERDVSTPPTVLPDNFPRYPVGKFFQYDTWKQSTQRLRRGLPALLRARRGHVLAKELEAFREAKRHRPLIALPTQDPAHGGAPPEMASNRKXAKLPQVCSPAPPSCSLLLTTDVSIRFHPENLSVPRPPGASPDPVPVPRLPETGYSPRPPPSG

SEQ ID NO: 1468 - protein, 2517 aa, Homo Sapiens
  misc_feature (2492)..(2492): Xaa can be any naturally occurring amino acid
MGAAAGRSPHLGPAPARRPQRSLLLLQLLLLVAAPGSTQAQAAPFPELCSYTWEAVDTKNNVLYKINICGSVDIVQCGPSSAVCMHDLKTRTYHSVGDSVLRSATRSLLEFNTTVSCDQQGTNHRVQSSIAFLCGKTLGTPEFVTATECVHYFEWRTTAACKKDIFKANKEVPCYVFDEELRKHDLNPLIKLSGAYLVDDSDPDTSLFINVCRDIDTLRDPGSQLRACPPGTAACLVRGHQAFDVGQPRDGLKLVRKDRLVLSYVREEAGKLDFCDGHSPAVTITFVCPSERREGTIPKLTAKSNCRYEIEWITEYACHRDYLESKTCSLSGEQQDVSIDLTPLAQSGGSSYISDGKEYLFYLNVCGETEIQFCNKKQAAVCQVKKSDTSQVKAAGRYHNQTLRYSDGDLTLIYFGGDECSSGFQRMSVINFECNKTAGNDGKGTPVFTGEVDCTYFFTWDTEYACVKEKEDLLCGATDGKKRYDLSALVRHAEPEQNWEAVDGSQTETEKKHFFINICHRVLQEGKARGCPEDAAVCAVDKNGSKNLGKFISSPMKEKGNIQLSYSDGDDCGHGKKIKTNITLVCKPGDLESAPVLRTSGEGGCFYEFEWHTAAACVLSKTEGENCTVFDSQAGFSFDLSPLTKKNGAYKVETKKYDFYINVCGPVSVSPCQPDSGACQVAKSDEKTWNLGLSNAKLSYYDGMIQLNYRGGTPYNNERHTPRATLITFLCDRDAGVGFPEYQEEDNSTYNFRWYTSYACPEEPLECVVTDPSTLEQYDLSSLAKSEGGLGGNWYAMDNSGEHVTWRKYYINVCRPLNPVPGCNRYASACQMKYEKDQGSFTEVVSISNLGMAKTGPVVEDSGSLLLEYVNGSACTTSDGRQTTYTTRIHLVCSRGRLNSHPIFSLNWECVVSFLWNTEAACPIQTTTDTDQACSIRDPNSGFVFNLNPLNSSQGYNVSGIGKIFMFNVCGTMPVCGTILGKPASGCEAETQTEELKNWKPARPVGIEKSLQLSTEGFITLTYKGPLSAKGTADAFIVRFVCNDDVYSGPLKFLHQDIDSGQGIRNTYFEFETALACVPSPVDCQVTDLAGNEYDLTGLSTVRKPWTAVDTSVDGRKRTFYLSVCNPLPYIPGCQGSAVGSCLVSEGNSWNLGVVQMSPQAAANGSLSIMYVNGDKCGNQRFSTRITFECAQISGSPAFQLQDGCEYVFIWRTVEACPVVRVEGDNCEVKDPRHGNLYDLKPLGLNDTIVSAGEYTYYFRVCGKLSSDVCPTSDKSKVVSSCQEKREPQGFHKVAGLLTQKLTYENGLLKMNFTGGDTCHKVYQRSTAIFFYCDRGTQRPVFLKETSDCSYLFEWRTQYACPPFDLTECSFKDGAGNSFDLSSLSRYSDNWEAITGTGDPEHYLINVCKSLAPQAGTEPCPPEAAACLLGGSKPVNLGRVRDGPQWRDGIIVLKYVDGDLCPDGIRKKSTTIRFTCSESQVNSRPMFISAVEDCEYTFAWPTATACPMKSNEHDDCQVTNPSTGHLFDLSSLSGRAGFTAAYSEKGLVYMSICGENENCPPGVGACFGQTRISVGKANKRLRYVDQVLQLVYKDGSPCPSKSGLSYKSVISFVCRPEAGPTNRPMLISLDKQTCTLFFSWHTPLACEQATECSVRNGSSIVDLSPLIHRTGGYEAYDESEDDASDTNPDFYINICQPLNPMHGVPCPAGAAVCKVPIDGPPIDIGRVAGPPILNPIANEIYLNFESSTPCLADKHFNYTSLIAFHCKRGVSMGTPKLLRTSECDFVFEWETPVVCPDEVRMDGCTLTDEQLLYSFNLSSLSTSTFKVTRDSRTYSVGVCTFAVGPEQGGCKDGGVCLLSGTKGASFGRLQSMKLDYRHQDEAVVLSYVNGDRCPPETDDGVPCVFPFIFNGKSYEECIIESRAKLWCSTTADYDRDHEWGFCRHSNSYRTSSIIFKCDEDEDIGRPQVFSEVRGCDVTFEWKTKVVCPPKKLECKFVQKHKTYDLRLLSSLTGSWSLVHNGVSYYINLCQKIYKGPLGCSERASICRRTTTGDVQVLGLVHTQKLGVIGDKVVVTYSKGYPCGGNKTASSVIELTCTKTVGRPAFKRFDIDSCTYYFSWDSRAACAVKPQEVQMVNGTITNPINGKSFSLGDIYFKLFRASGDMRTNGDNYLYEIQLSSITSSRNPACSGANICQVKPNDQHFSRKVGTSDKTKYYLQDGDLDVVFASSSKCGKDKTKSVSSTIFFHCDPLVEDGIPEFSHETADCQYLFSWYTSAVCPLGVGFDSENPGDDGQMHKGLSERSQAVGAVLSLLLVALTCCLLALLLYKKERRETVISKLTTCCRRSSNVSYKYSKVNKEEETDENETEWLMEEIQLPPPRQGKEGQENGHITTKSVKALSSLHGDDQDSEDEVLTIPEVKVHSGRGAGAESSHPVRNAQSNALQEREDDRVGLVRGEKARKGKSSSAQQKTVSSTKLVSFHDDSDEDLLHIXLRSACRGARSRGTAKHLQPNKTSTR

SEQ ID NO: 1469 - protein, 364 aa, Homo Sapiens
  misc_feature (329)..(329): Xaa can be any naturally occurring amino acid
MLPRVGCPALPLPPPPLLPLLPLLLLLLGASGGGGGARAEVLFRCPPCTPERLAACGPPPVAPPAAVAAVAGGARMPCAELVREPGCGCCSVCARLEGEACGVYTPRCGQGLRCYPHPGSELPLQALVMGEGTCEKRRDAEYGASPEQVADNGDDHSEGGLVENHVDSTMNMLGGGGSAGRKPLKSGMKELAVFREKVTEQHRQMGKGGKHHLGLEEPKKLRPPPARTPCQQELDQVLERISTMRLPDERGPLEHLYSLHIPNCDKHGLYNLKQCKMSLNGQRGECWCVNPNTGKLIQGAPTIRGDPECHLFYNEQQEARGVHTQRMQXTAASRCLAPLPPAPLQTPAENGECLGGGCWRIFQF

SEQ ID NO: 1470 - protein, 331 aa, Homo Sapiens
  misc_feature (292)..(292): Xaa can be any naturally occurring amino acid
MQRARPTLWAAALTLLVLLRGPPVARAGASSAGLGPVVRCEPCDARALAQCAPPPAVCAELVREPGCGCCLTCALSEGQPCGIYTERCGSGLRCQPSPDEARPLQALLDGRGLCVNASAVSRLRAYLLPAPPAPGNASESEEDRSAGSVESPSVSSTHRVSDPKFHPLHSKIIIIKKGHAKDSQRYKVDYESQSTDTQNFSSESKRETEYGPCRREMEDTLNHLKFLNVLSPRGVHIPNCDKKGFYKKKQCRPSKGRKRGFCWCVDKYGQPLPGYTTKGKEDVHCYSMQSKXTPAARLMWSSNMPYFAQKTAKDMTSSWLQPRFIFLFVVN

SEQ ID NO: 1471 - protein, 337 aa, Homo Sapiens
  misc_feature (298)..(298): Xaa can be any naturally occurring amino acid
MQRARPTLWAAALTLLVLLRGPPVARAGASSAGLGPVVRCEPCDARALAQCAPPPAVCAELVREPGCGCCLTCALSEGQPCGIYTERCGSGLRCQPSPDEARPLQALLDGRGLCVNASAVSRLRAYLLPAPPAPGEPPAPGNASESEEDRSAGSVESPSVSSTHRVSDPKFHPLHSKIIIIKKGHAKDSQRYKVDYESQSTDTQNFSSESKRETEYGPCRREMEDTLNHLKFLNVLSPRGVHIPNCDKKGFYKKKQCRPSKGRKRGFCWCVDKYGQPLPGYTTKGKEDVHCYSMQSKXTPAARLMWSSNMPYFAQKTAKDMTSSWLQPRFIFLFVVN

SEQ ID NO: 1472 - protein, 186 aa, Homo Sapiens
  misc_feature (179)..(179): Xaa can be any naturally occurring amino acid
MHSSALLCCLVLLTGVRASPGQGTQSENSCTHFPGNLPNMLRDLRDAFSRVKTFFQMKDQLDNLLLKESLLEDFKGYLGCQALSEMIQFYLEEVMPQAENQDPDIKAHVNSLGENLKTLRLRLRRCHRFLPCENKSKAVEQVKNAFNKLQEKGIYKAMSEFDIFINYIEAYMTMKIRNXDIRVATL

SEQ ID NO: 1473 - protein, 268 aa, Homo Sapiens
  misc_feature (254)..(254): Xaa can be any naturally occurring amino acid
MWPPGSASQPPPSPAAATGLHPAARPVSLQCRLSMCPARSLLLVATLVLLDHLSLARNLPVATPDPGMFPCLHHSQNLLRAVSNMLQKARQTLEFYPCTSEEIDHEDITKDKTSTVEACLPLELTKNESCLNSRETSFITNGSCLASRKTSFMMALCLSSIYEDLKMYQVEFKTMNAKLLMDPKRQIFLDQNMLAVIDELMQALNFNSETVPQKSSLEEPDFYKTKIKLCILLHAFRIRAVTIDRVMSYLNASXKARSLQTVVIFIKL

SEQ ID NO: 1474 - protein, 203 aa, Homo Sapiens
  misc_feature (163)..(163): Xaa can be any naturally occurring amino acid
MRISKPHLRSISIQCYLCLLLNSHFLTEAGIHVFILGCFSAGLPKTEANWVNVISDLKKIEDLIQSMHIDATLYTESDVHPSCKVTAMKCFLLELQVISLESGDASIHDTVENLIILANNSLSSNGNVTESGCKECEELEEKNIKEFLQSFVHIVQMFINTSXLQLILFKVFLLLTNITLLLRHNKTLGISNVLSKQVFLSRR

SEQ ID NO: 1475 - protein, 652 aa, Homo Sapiens
  misc_feature (632)..(632): Xaa can be any naturally occurring amino acid
MDYSFDTTAEDPWVRISDCIKNLFSPIMSENHGHMPLQPNASLNEEEGTQGHPDGTPPKLDTANGTPKVYKSADSSTVKKGPPVAPKPAWFRQSLKGLRNRASDPRGLPDPALSTQPAPASREHLGSHIRASSSSSSIRQRISSFETFGSSQLPDKGAQRLSLQPSSGEAAKPLGKHEEGRFSGLLGRGAAPTLVPQQPEQVLSSGSPAASEARDPGVSESPPPGRQPNQKTLPPGPDPLLRLLSTQAEESQGPVLKMPSQRARSFPLTRSQSCETKLLDEKTSKLYSISSQVSSAVMKSLLCLPSSISCAQTPCIPKEGASPTSSSNEDSAANGSAETSALDTGFSLNLSELREYTEGLTEAKEDDDGDHSSLQSGQSVISLLSSEELKKLIEEVKVLDEATLKQLDGIHVTILHKEEGAGLGFSLAGGADLENKVITVHRVFPNGLASQEGTIQKGNEVLSINGKSLKGTTHHDALAILRQAREPRQAVIVTRKLTPEAMPDLNSSTDSAASASAASDVSVESTAEATVCTVTLEKMSAGLGFSLEGGKGSLHGDKPLTINRIFKGAASEQSETVQPGDEILQLGGTAMQGLTRFEAWNIIKALPDGPVTIVIRRKSLQSKETTAAGDSXAGHAEAKANNTQLTHSSHNR

SEQ ID NO: 1476 - protein, 167 aa, Homo Sapiens
  misc_feature (156)..(156): Xaa can be any naturally occurring amino acid
MTPGKTSLVSLLLLLSLEAIVKAGITIPRNPGCPNSEDKNFPRTVMVNLNIHNRNTNTNPKRSSDYYNRSTSPWNLHRNEDPERYPSVIWEAKCRHLGCINADGNVDYHMNSVPIQQEILVLRREPPHCPNSFRLEKILVSVGCTCVTPIVHHVAXELWGAHTPQSS

SEQ ID NO: 1477 - protein, 207 aa, Homo Sapiens
  misc_feature (194)..(194): Xaa can be any naturally occurring amino acid
MAAEPVEDNCINFVAMKFIDNTLYFIAEDDENLESDYFGKLESKLSVIRNLNDQVLFIDQGNRPLFEDMTDSDCRDNAPRTIFIISMYKDSQPRGMAVTISVKCEKISTLSCENKIISFKEMNPPDNIKDTKSDIIFFQRSVPGHDNKMQFESSSYEGYFLACEKERDLFKLILKKEDELGDRSIMFTVQNEDXLLKFHAGRSGSRL

SEQ ID NO: 1478 - protein, 316 aa, Homo Sapiens
  misc_feature (270)..(270): Xaa can be any naturally occurring amino acid
MAEVPELASEMMAYYSGNEDDLFFEADGPKQMKCSFQDLDLCPLDGGIQLRISDHHYSKGFRQAASVVVAMDKLRKMLVPCPQTFQENDLSTFFPFIFEEEPIFFDTWDNEAYVHDAPVRSLNCTLRDSQQKSLVMSGPYELKALHLQGQDMEQQVVFSMSFVQGEESNDKIPVALGLKEKNLYLSCVLKDDKPTLQLESVDPKNYPKKKMEKRFVFNKIEINNKLEFESAQFPNWYISTSQAENMPVFLGGTKGGQDITDFTMQFVSSXRELYPESPVLNVDSIPRAGRKGTERFLSTAIAWTFLLSTPMPNCLP

SEQ ID NO: 1479 - protein, 191 aa, Homo Sapiens
  misc_feature (160)..(160): Xaa can be any naturally occurring amino acid
MALETICRPSGRKSSKMQAFRIWDVNQKTFYLRNNQLVAGYLQGPNVNLEEKIDVVPIEPHALFLGIHGGKMCLSCVKSGDETRLQLEAVNITDLSENRKQDKRFAFIRSDSGPTTSFESAACPGWFLCTAMEADQPVSLTNMPDEGVMVTKFYFQEDEXYCPGLPVPILAWQGLQGLPVPLPQGSRLWGH

SEQ ID NO: 1480 - protein, 212 aa, Homo Sapiens
  misc_feature (181)..(181): Xaa can be any naturally occurring amino acid
MALADLYEEGGGGGGEGEDNADSKETICRPSGRKSSKMQAFRIWDVNQKTFYLRNNQLVAGYLQGPNVNLEEKIDVVPIEPHALFLGIHGGKMCLSCVKSGDETRLQLEAVNITDLSENRKQDKRFAFIRSDSGPTTSFESAACPGWFLCTAMEADQPVSLTNMPDEGVMVTKFYFQEDEXYCPGLPVPILAWQGLQGLPVPLPQGSRLWGH

SEQ ID NO: 1481 - protein, 209 aa, Homo Sapiens
  misc_feature (178)..(178): Xaa can be any naturally occurring amino acid
MEICRGLRSHLITLLLFLFHSETICRPSGRKSSKMQAFRIWDVNQKTFYLRNNQLVAGYLQGPNVNLEEKIDVVPIEPHALFLGIHGGKMCLSCVKSGDETRLQLEAVNITDLSENRKQDKRFAFIRSDSGPTTSFESAACPGWFLCTAMEADQPVSLTNMPDEGVMVTKFYFQEDEXYCPGLPVPILAWQGLQGLPVPLPQGSRLWGH

SEQ ID NO: 1482 - protein, 175 aa, Homo Sapiens
  misc_feature (144)..(144): Xaa can be any naturally occurring amino acid
MQAFRIWDVNQKTFYLRNNQLVAGYLQGPNVNLEEKIDVVPIEPHALFLGIHGGKMCLSCVKSGDETRLQLEAVNITDLSENRKQDKRFAFIRSDSGPTTSFESAACPGWFLCTAMEADQPVSLTNMPDEGVMVTKFYFQEDEXYCPGLPVPILAWQGLQGLPVPLPQGSRLWGH

SEQ ID NO: 1483 - protein, 374 aa, Homo Sapiens
  misc_feature (370)..(370): Xaa can be any naturally occurring amino acid
MLKPSLPFTSLLFLQLPLLGVGLNTTILTPNGNEDTTADFFLTTMPTDSLSVSTLPLPEVQCFVFNVEYMNCTWNSSSEPQPTNLTLHYWYKNSDNDKVQKCSHYLFSEEITSGCQLQKKEIHLYQTFVVQLQDPREPRRQATQMLKLQNLVIPWAPENLTLHKLSESQLELNWNNRFLNHCLEHLVQYRTDWDHSWTEQSVDYRHKFSLPSVDGQKRYTFRVRSRFNPLCGSAQHWSEWSHPIHWGSNTSKENPFLFALEAVVISVGSMGLIISLLCVYFWLERTMPRIPTLKNLEDLVTEYHGNFSAWSGVSKGLAESLQPDYSERLCLVSEIPPKGGALGEGPGASPCNQHSPYWAPPCYTLKPETXTPIL

SEQ ID NO: 1484 - protein, 862 aa, Homo Sapiens
  misc_feature (826)..(826): Xaa can be any naturally occurring amino acid
MGWLCSGLLFPVSCLVLLQVASSGNMKVLQEPTCVSDYMSISTCEWKMNGPTNCSTELRLLYQLVFLLSEAHTCIPENNGGAGCVCHLLMDDVVSADNYTLDLWAGQQLLWKGSFKPSEHVKPRAPGNLTVHTNVSDTLLLTWSNPYPPDNYLYNHLTYAVNIWSENDPADFRIYNVTYLEPSLRIAASTLKSGISYRARVRAWAQCYNTTWSEWSPSTKWHNSYREPFEQHLLLGVSVSCIVILAVCLLCYVSITKIKKEWWDQIPNPARSRLVAIIIQDAQGSQWEKRSRGQEPAKCPHWKNCLTKLLPCFLEHNMKRDEDPHKAAKEMPFQGSGKSAWCPVEISKTVLWPESISVVRCVELFEAPVECEEEEEVEEEKGSFCASPESSRDDFQEGREGIVARLTESLFLDLLGEENGGFCQQDMGESCLLPPSGSTSAHMPWDEFPSAGPKEAPPWGKEQPLHLEPSPPASPTQSPDNLTCTETPLVIAGNPAYRSFSNSLSQSPCPRELGPDPLLARHLEEVEPEMPCVPQLSEPTTVPQPEPETWEQILRRNVLQHGAAAAPVSAPTSGYQEFVHAVEQGGTQASAVVGLGPPGEAGYKAFSSLLASSAVSPEKCGFGASSGEEGYKPFQDLIPGCPGDPAPVPVPLFTFGLDREPPRSPQSSHLPSSSPEHLGLEPGEKVEDMPKPPLPQEQATDPLVDSLGSGIVYSALTCHLCGHLKQCHGQEDGGQTPVMASPCCGCCCGDRSSPPTTPLRAPDPSPGGVPLEASLCPASLAPSGISEKSKSSSSFHPAPGNAQSSSQTPKIVNFVSVGPTYMRVSXVHVLLLLSLQMRTRAYPCLGNATSWKAARLADFQKT

SEQ ID NO: 1485 - protein, 255 aa, Homo Sapiens
  misc_feature (213)..(213): Xaa can be any naturally occurring amino acid
MNSFSTSAFGPVAFSLGLLLVLPAAFPAPVPPGEDSKDVAAPHRQPLTSSERIDKQIRYILDGISALRKETCNKSNMCESSKEALAENNLNLPKMAEKDGCFQSGFNEETCLVKIITGLLEFEVYLEYLQNRFESSEEQARAVQMSTKVLIQFLQKKAKNLDAITTPDPTTNASLLTKLQAQNQWLQDMTTHLILRSFKEFLQSSLRALRQMXHGHLRLLLLMGIPSSGQKPVHWAQNLCCSLWRTKSMSVRTLF

SEQ ID NO: 1486 - protein, 481 aa, Homo Sapiens
  misc_feature (469)..(469): Xaa can be any naturally occurring amino acid
MLAVGCALLAALLAAPGAALAPRRCPAQEVARGVLTSLPGDSVTLTCPGVEPEDNATVHWVLRKPAAGSHPSRWAGMGRRLLLRSVQLHDSGNYSCYRAGRPAGTVHLLVDVPPEEPQLSCFRKSPLSNVVCEWGPRSTPSLTTKAVLLVRKFQNSPAEDFQEPCQYSQESQKFSCQLAVPEGDSSFYIVSMCVASSVGSKFSKTQTFQGCGILQPDPPANITVTAVARNPRWLSVTWQDPHSWNSSFYRLRFELRYRAERSKTFTTWMVKDLQHHCVIHDAWSGLRHVVQLRAQEEFGQGEWSEWSPEAMGTPWTESRSPPAENEVSTPMQALTTNKDDDNILFRDSANATSLPVQDSSSVPLPTFLVAGGSLAFGTLLCIAIVLRFKKTWKLRALKEGKTSMHPPYSLGQLVPERPRPTPVLVPLISPPVSPSSLGSDNTSSHNRPDARDPRSPYDISNTDYFFPRXLAGWHQQPGPCG

SEQ ID NO: 1487 - protein, 499 aa, Homo Sapiens
  misc_feature (366)..(366): Xaa can be any naturally occurring amino acid
MLAVGCALLAALLAAPGAALAPRRCPAQEVARGVLTSLPGDSVTLTCPGVEPEDNATVHWVLRKPAAGSHPSRWAGMGRRLLLRSVQLHDSGNYSCYRAGRPAGTVHLLVDVPPEEPQLSCFRKSPLSNVVCEWGPRSTPSLTTKAVLLVRKFQNSPAEDFQEPCQYSQESQKFSCQLAVPEGDSSFYIVSMCVASSVGSKFSKTQTFQGCGILQPDPPANITVTAVARNPRWLSVTWQDPHSWNSSFYRLRFELRYRAERSKTFTTWMVKDLQHHCVIHDAWSGLRHVVQLRAQEEFGQGEWSEWSPEAMGTPWTESRSPPAENEVSTPMQALTTNKDDDNILFRDSANATSLPGSRRRGSCGLXRKARQACIRRTLWGSWSRRGLDPPQCLFLSSPHRCPPAAWGLTIPRATTDQMPGTHGALMTSAIQTTSSPDSWLGGTSSLDPVDDKTQTGSAKDASHCHASLSQGCAAFGFTEEPCGRFYARGKSACSSCSAG

SEQ ID NO: 1488 - protein, 212 aa, Homo Sapiens
  misc_feature (178)..(178): Xaa can be any naturally occurring amino acid
MFHVSFRYIFGLPPLILVLLPVASSDCDIEGKDGKQYESVLMVSIDQLLDSMKEIGSNCLNNEFNFFKRHICDANKEGMFLFRAARKLRQFLKMNSTGDFDLHLLKVSEGTTILLNCTGQVKGRKPAALGEAQPTKSLEENKSLKEQKKLNDLCFLKRLLQEIKTCWNKILMGTKEHXKIWSGNIETRTLAASSKNLSAYAVFQSGMLPRSY

SEQ ID NO: 1489 - protein, 111 aa, Homo Sapiens
  misc_feature (100)..(100): Xaa can be any naturally occurring amino acid
MTSKLAVALLAAFLISAALCEGAVLPRSAKELRCQCIKTYSKPFHPKFIKELRVIESGPHCANTEIIVKLSDGRELCLDPKENWVQRVVEKFLKRAENSXKNSFSVVSKNQ

SEQ ID NO: 1490 - protein, 455 aa, Homo Sapiens
  misc_feature (427)..(427): Xaa can be any naturally occurring amino acid
MPLLWLRGFLLASCWIIVRSSPTPGSEGHSAAPDCPSCALAALPKDVPNSQPEMVEAVKKHILNMLHLKKRPDVTQPVPKAALLNAIRKLHVGKVGENGYVEIEDDIGRRAEMNELMEQTSEIITFAESGTARKTLHFEISKEGSDLSVVERAEVWLFLKVPKANRTRTKVTIRLFQQQKHPQGSLDTGEEAEEVGLKGERSELLLSEKVVDARKSTWHVFPVSSSIQRLLDQGKSSLDVRIACEQCQESGASLVLLGKKKKKEEEGEGKKKGGGEGGAGADEEKEQSHRPFLMLQARQSEDHPHRRRRRGLECDGKVNICCKKQFFVSFKDIGWNDWIIAPSGYHANYCEGECPSHIAGTSGSSLSFHSTVINHYRMRGHSPFANLKSCCVPTKLRPMSMLYYDDGQNIIKKDIQNMIVEECGCSXSCPAQGEREQELSREDSGKMKKFLRFLS

SEQ ID NO: 1491 - protein, 449 aa, Homo Sapiens
  misc_feature (408)..(408): Xaa can be any naturally occurring amino acid
MDGLPGRALGAACLLLLAAGWLGPEAWGSPTPPPTPAAPPPPPPPGSPGGSQDTCTSCGGFRRPEELGRVDGDFLEAVKRHILSRLQMRGRPNITHAVPKAAMVTALRKLHAGKVREDGRVEIPHLDGHASPGADGQERVSEIISFAETDGLASSRVRLYFFISNEGNQNLFVVQASLWLYLKLLPYVLEKGSRRKVRVKVYFQEQGHGDRWNMVEKRVDLKRSGWHTFPLTEAIQALFERGERRLNLDVQCDSCQELAVVPVFVDPGEESHRPFVVVQARLGDSRHRIRKRGLECDGRTNLCCRQQFFIDFRLIGWNDWIIAPTGYYGNYCEGSCPAYLAGVPGSASSFHTAVVNQYRMRGLNPGTVNSCCIPTKLSTMSMLYFDDEYNIVKRDVPNMIVEECGCAXQCKAGARWWGTEGSPGWASSSPRGNGGTRWAEYSHSVGLWR

SEQ ID NO: 1492 - protein, 1063 aa, Homo Sapiens
  misc_feature (1052)..(1052): Xaa can be any naturally occurring amino acid
MGPGPSRAPRAPRLMLCALALMVAAGGCVVSAFNLDTRFLVVKEAGNPGSLFGYSVALHRQTERQQRYLLLAGAPRELAVPDGYTNRTGAVYLCPLTAHKDDCERMNITVKNDPGHHIIEDMWLGVTVASQGPAGRVLVCAHRYTQVLWSGSEDQRRMVGKCYVRGNDLELDSSDDWQTYHNEMCNSNTDYLETGMCQLGTSGGFTQNTVYFGAPGAYNWKGNSYMIQRKEWDLSEYSYKDPEDQGNLYIGYTMQVGSFILHPKNITIVTGAPRHRHMGAVFLLSQEAGGDLRRRQVLEGSQVGAYFGSAIALADLNNDGWQDLLVGAPYYFERKEEVGGAIYVFMNQAGTSFPAHPSLLLHGPSGSAFGLSVASIGDINQDGFQDIAVGAPFEGLGKVYIYHSSSKGLLRQPQQVIHGEKLGLPGLATFGYSLSGQMDVDENFYPDLLVGSLSDHIVLLRARPVINIVHKTLVPRPAVLDPALCTATSCVQVELCFAYNQSAGNPNYRRNITLAYTLEADRDRRPPRLRFAGSESAVFHGFFSMPEMRCQKLELLLMDNLRDKLRPIIISMNYSLPLRMPDRPRLGLRSLDAYPILNQAQALENHTEVQFQKECGPDNKCESNLQMRAAFVSEQQQKLSRLQYSRDVRKLLLSINVTNTRTSERSGEDAHEALLTLVVPPALLLSSVRPPGACQANETIFCELGNPFKRNQRMELLIAFEVIGVTLHTRDLQVQLQLSTSSHQDNLWPMILTLLVDYTLQTSLSMVNHRLQSFFGGTVMGESGMKTVEDVGSPLKYEFQVGPMGEGLVGLGTLVLGLEWPYEVSNGKWLLYPTEITVHGNGSWPCRPPGDLINPLNLTLSDPGDRPSSPQRRRRQLDPGGGQGPPPVTLAAAKKAKSETVLTCATGRAHCVWLECPIPDAPVVTNVTVKARVWNSTFIEDYRDFDRVRVNGWATLFLRTSIPTINMENKTTWFSVDIDSELVEELPAEIELWLVLVAVGAGLLLLGLIILLLWKCGFFKRARTRALYEAKRQKAEMKSQPSETERLTDDYXGGSPPPPAHLV

SEQ ID NO: 1493 - protein, 1059 aa, Homo Sapiens
  misc_feature (1050)..(1050): Xaa can be any naturally occurring amino acid
MGSRTPESPLHAVQLRWGPRRRPPLLPLLLLLLPPPPRVGGFNLDAEAPAVLSGPPGSFFGFSVEFYRPGTDGVSVLVGAPKANTSQPGVLQGGAVYLCPWGASPTQCTPIEFDSKGSRLLESSLSSSEGEEPVEYKSLQWFGATVRAHGSSILACAPLYSWRTEKEPLSDPVGTCYLSTDNFTRILEYAPCRSDFSWAAGQGYCQGGFSAEFTKTGRVVLGGPGSYFWQGQILSATQEQIAESYYPEYLINLVQGQLQTRQASSIYDDSYLGYSVAVGEFSGDDTEDFVAGVPKGNLTYGYVTILNGSDIRSLYNFSGEQMASYFGYAVAATDVNGDGLDDLLVGAPLLMDRTPDGRPQEVGRVYVYLQHPAGIEPTPTLTLTGHDEFGRFGSSLTPLGDLDQDGYNDVAIGAPFGGETQQGVVFVFPGGPGGLGSKPSQVLQPLWAASHTPDFFGSALRGGRDLDGNGYPDLIVGSFGVDKAVVYRGRPIVSASASLTIFPAMFNPEERSCSLEGNPVACINLSFCLNASGKHVADSIGFTVELQLDWQKQKGGVRRALFLASRQATLTQTLLIQNGAREDCREMKIYLRNESEFRDKLSPIHIALNFSLDPQAPVDSHGLRPALHYQSKSRIEDKAQILLDCGEDNICVPDLQLEVFGEQNHVYLGDKNALNLTFHAQNVGEGGAYEAELRVTAPPEAEYSGLVRHPGNFSSLSCDYFAVNQSRLLVCDLGNPMKAGASLWGGLRFTVPHLRDTKKTIQFDFQILSKNLNNSQSDVVSFRLSVEAQAQVTLNGVSKPEAVLFPVSDWHPRDQPQKEEDLGPAVHHVYELINQGPSSISQGVLELSCPQALEGQQLLYVTRVTGLNCTTNHPINPKGLELDPEGSLHHQQKREAPSRSSASSGPQILKCPEAECFRLRCELGPLHQQESQSLQLHFRVWAKTFLQREHQPFSLQCEAVYKALKMPYRILPRQLPQKERQVATAVQWTKAEGSYGVPLWIIILAILFGLLLLGLLIYILYKLGFFKRSLPYGTAMEKAQLKPPATSDAXVLPISDSHS

SEQ ID NO: 1494 - protein, 1058 aa, Homo Sapiens
  misc_feature (1049)..(1049): Xaa can be any naturally occurring amino acid
MAFPPRRRLRLGPRGLPLLLSGLLLPLCRAFNLDVDSPAEYSGPEGSYFGFAVDFFVPSASSRMFLLVGAPKANTTQPGIVEGGQVLKCDWSSTRRCQPIEFDATGNRDYAKDDPLEFKSHQWFGASVRSKQDKILACAPLYHWRTEMKQEREPVGTCFLQDGTKTVEYAPCRSQDIDADGQGFCQGGFSIDFTKADRVLLGGPGSFYWQGQLISDQVAEIVSKYDPNVYSIKYNNQLATRTAQAIFDDSYLGYSVAVGDFNGDGIDDFVSGVPRAARTLGMVYIYDGKNMSSLYNFTGEQMAAYFGFSVAATDINGDDYADVFIGAPLFMDRGSDGKLQEVGQVSVSLQRASGDFQTTKLNGFEVFARFGSAIAPLGDLDQDGFNDIAIAAPYGGEDKKGIVYIFNGRSTGLNAVPSQILEGQWAARSMPPSFGYSMKGATDIDKNGYPDLIVGAFGVDRAILYRARPVITVNAGLEVYPSILNQDNKTCSLPGTALKVSCFNVRFCLKADGKGVLPRKLNFQVELLLDKLKQKGAIRRALFLYSRSPSHSKNMTISRGGLMQCEELIAYLRDESEFRDKLTPITIFMEYRLDYRTAADTTGLQPILNQFTPANISRQAHILLDCGEDNVCKPKLEVSVDSDQKKIYIGDDNPLTLIVKAQNQGEGAYEAELIVSIPLQADFIGVVRNNEALARLSCAFKTENQTRQVVCDLGNPMKAGTQLLAGLRFSVHQQSEMDTSVKFDLQIQSSNLFDKVSPVVSHKVDLAVLAAVEIRGVSSPDHIFLPIPNWEHKENPETEEDVGPVVQHIYELRNNGPSSFSKAMLHLQWPYKYNNNTLLYILHYDIDGPMNCTSDMEINPLRIKISSLQTTEKNDTVAGQGERDHLITKRDLALSEGDIHTLGCGVAQCLKIVCQVGRLDRGKSAILYVKSLLWTETFMNKENQNHSYSLKSSASFNVIEFPYKNLPIEDITNSTLVTTNVTWGIQPAPMPVPVWVIILAVLAGLLLLAVLVFVMYRMGFFKRVRPPQEEQEREQLQPHENGEGNSETXLQFLSYATS

SEQ ID NO: 1495 - protein, 712 aa, Homo Sapiens
  misc_feature (707)..(707): Xaa can be any naturally occurring amino acid
MATANFGKIQIGIYVEIKRSDGRIHQAMVTSLNEDNESVTVEWIENGDTKGKEIDLESIFSLNPDLVPDEEIEPSPETPPPPASSAKVNKIVKNRRTVASIKNDPPSRDNRVVGSARARPSQFPEQSSSAQQNGSVSDISPVQAAKKEFGPPSRRKSNCVKEVEKLQEKREKRRLQQQELREKRAQDVDATNPNYEIMCMIRDFRGSLDYRPLTTADPIDEHRICVCVRKRPLNKKETQMKDLDVITIPSKDVVMVHEPKQKVDLTRYLENQTFRFDYAFDDSAPNEMVYRFTARPLVETIFERGMATCFAYGQTGSGKTHTMGGDFSGKNQDCSKGIYALAARDVFLMLKKPNYKKLELQVYATFFEIYSGKVFDLLNRKTKLRVLEDGKQQVQVVGLQEREVKCVEDVLKLIDIGNSCRTSGQTSANAHSSRSHAVFQIILRRKGKLHGKFSLIDLAGNERGADTSSADRQTRLEGAEINKSLLALKECIRALGRNKPHTPFRASKLTQVLRDSFIGENSRTCMIATISPGMASCENTLNTLRYANRVKELTVDPTAAGDVRPIMHHPPNQIDDLETQWGVGSSPQRDDLKLLCEQNEEEVSPQLFTFHEAVSQMVEMEEQVVEDHRAVFQESIRWLEDEKALLEMTEEVDYDVDSYATQLEAILEQKIDILTELRDKVKSFRAALQEEEQASKQINPKRPRALXTGICC

SEQ ID NO: 1496 - protein, 988 aa, Homo Sapiens
  misc_feature (977)..(977): Xaa can be any naturally occurring amino acid
MRGARGAWDFLCVLLLLLRVQTGSSQPSVSPGEPSPPSIHPGKSDLIVRVGDEIRLLCTDPGFVKWTFEILDETNENKQNEWITEKAEATNTGKYTCTNKHGLSNSIYVFVRDPAKLFLVDRSLYGKEDNDTLVRCPLTDPEVTNYSLKGCQGKPLPKDLRFIPDPKAGIMIKSVKRAYHRLCLHCSVDQEGKSVLSEKFILKVRPAFKAVPVVSVSKASYLLREGEEFTVTCTIKDVSSSVYSTWKRENSQTKLQEKYNSWHHGDFNYERQATLTISSARVNDSGVFMCYANNTFGSANVTTTLEVVDKGFINIFPMINTTVFVNDGENVDLIVEYEAFPKPEHQQWIYMNRTFTDKWEDYPKSENESNIRYVSELHLTRLKGTEGGTYTFLVSNSDVNAAIAFNVYVNTKPEILTYDRLVNGMLQCVAAGFPEPTIDWYFCPGTEQRCSASVLPVDVQTLNSSGPPFGKLVVQSSIDSSAFKHNGTVECKAYNDVGKTSAYFNFAFKGNNKEQIHPHTLFTPLLIGFVIVAGMMCIIVMILTYKYLQKPMYEVQWKVVEEINGNNYVYIDPTQLPYDHKWEFPRNRLSFGKTLGAGAFGKVVEATAYGLIKSDAAMTVAVKMLKPSAHLTEREALMSELKVLSYLGNHMNIVNLLGACTIGGPTLVITEYCCYGDLLNFLRRKRDSFICSKQEDHAEAALYKNLLHSKESSCSDSTNEYMDMKPGVSYVVPTKADKRRSVRIGSYIERDVTPAIMEDDELALDLEDLLSFSYQVAKGMAFLASKNCIHRDLAARNILLTHGRITKICDFGLARDIKNDSNYVVKGNARLPVKWMAPESIFNCVYTFESDVWSYGIFLWELFSLGSSPYPGMPVDSKFYKMIKEGFRMLSPEHAPAEMYDIMKTCWDADPLKRPTFKQIVQLIEKQISESTNHIYSNLANCSPNRQKPVVDHSVRINSVGSTASSSQPLLVHDDVXAESVFGSPLQE

SEQ ID NO: 1497 - protein, 288 aa, Homo Sapiens
  misc_feature (274)..(274): Xaa can be any naturally occurring amino acid
MKKTQTWILTCIYLQLLLFNPLVKTEGICRNRVTNNVKDVTKLVANLPKDYMITLKYVPGMDVLPSHCWISEMVVQLSDSLTDLLDKFSNISEGLSNYSIIDKLVNIVDDLVECVKENSSKDLKKSFKSPEPRLFTPEEFFRIFNRSIDAFKDFVVASETSDCVVSSTLSPEKDSRVSVTKPFMLPPVAASSLRNDSSSSNRKAKNPPGDSSLHWAAMALPALFSLIIGFAFGALYWKKRQPSLTRAVENIQINEEDNEISMLQEKEREFQEVXLWLVSTLLLSYIGW

SEQ ID NO: 1498 - protein, 278 aa, Homo Sapiens
  misc_feature (251)..(251): Xaa can be any naturally occurring amino acid
MRILQLILLALATGLVGGETRIIKGFECKPHSQPWQAALFEKTRLLCGATLIAPRWLLTAAHCLKPRYIVHLGQHNLQKEEGCEQTRTATESFPHPGFNNSLPNKDHRNDIMLVKMASPVSITWAVRPLTLSSRCVTAGTSCLISGWGSTSSPQLRLPHTLRCANITIIEHQKCENAYPGNITDTMVCASVQEGGKDSCQGDSGGPLVCNQSLQGIISWGQDPCAITRKPGVYTKVCKYVDWIQETMKNNXTGPTHHSPSPSISTWCLVPVHSVNKKP

SEQ ID NO: 1499 - protein, 310 aa, Homo Sapiens
  misc_feature (283)..(283): Xaa can be any naturally occurring amino acid
MQRLRWLRDWKSSGRGLTAAKEPGARSSPLQAMRILQLILLALATGLVGGETRIIKGFECKPHSQPWQAALFEKTRLLCGATLIAPRWLLTAAHCLKPRYIVHLGQHNLQKEEGCEQTRTATESFPHPGFNNSLPNKDHRNDIMLVKMASPVSITWAVRPLTLSSRCVTAGTSCLISGWGSTSSPQLRLPHTLRCANITIIEHQKCENAYPGNITDTMVCASVQEGGKDSCQGDSGGPLVCNQSLQGIISWGQDPCAITRKPGVYTKVCKYVDWIQETMKNNXTGPTHHSPSPSISTWCLVPVHSVNKKP

SEQ ID NO: 1500 - protein, 289 aa, Homo Sapiens
  misc_feature (262)..(262): Xaa can be any naturally occurring amino acid
MWVPVVFLTLSVTWIGAAPLILSRIVGGWECEKHSQPWQVLVASRGRAVCGGVLVHPQWVLTAAHCIRNKSVILLGRHSLFHPEDTGQVFQVSHSFPHPLYDMSLLKNRFLRPGDDSSHDLMLLRLSEPAELTDAVKVMDLPTQEPALGTTCYASGWGSIEPEEFLTPKKLQCVDLHVISNDVCAQVHPQKVTKFMLCAGRWTGGKSTCSGDSGGPLVCNGVLQGITSWGSEPCALPERPSLYTKVVHYRKWIKDTIVANPXAPLSTPYCSKLGTLEMTRPRLKPPQFY

SEQ ID NO: 1501 - protein, 432 aa, Homo Sapiens
  misc_feature (401)..(401): Xaa can be any naturally occurring amino acid
MTSYSYRQSSATSSFGGLGGGSVRFGPGVAFRAPSIHGGSGGRGVSVSSARFVSSSSSGAYGGGYGGVLTASDGLLAGNEKLTMQNLNDRLASYLDKVRALEAANGELEVKIRDWYQKQGPGPSRDYSHYYTTIQDLRDKILGATIENSRIVLQIDNARLAADDFRTKFETEQALRMSVEADINGLRRVLDELTLARTDLEMQIEGLKEELAYLKKNHEEEISTLRGQVGGQVSVEVDSAPGTDLAKILSDMRSQYEVMAEQNRKDAEAWFTSRTEELNREVAGHTEQLQMSRSEVTDLRRTLQGLEIELQSQLSMKAALEDTLAETEARFGAQLAHIQALISGIEAQLGDVRADSERQNQEYQRLMDIKSRLEQEIATYRSLLEGQEDHYNNLSASKVLXGSRLWGFCCPLEGVFWVEGWEGRDPYPRLFS

SEQ ID NO: 1502 - protein, 509 aa, Homo Sapiens
  misc_feature (484)..(484): Xaa can be any naturally occurring amino acid
MSIRVTQKSYKVSTSGPRAFSSRSYTSGPGSRISSSSFSRVGSSNFRGGLGGGYGGASGMGGITAVTVNQSLLSPLVLEVDPNIQAVRTQEKEQIKTLNNKFASFIDKVRFLEQQNKMLETKWSLLQQQKTARSNMDNMFESYINNLRRQLETLGQEKLKLEAELGNMQGLVEDFKNKYEDEINKRTEMENEFVLIKKDVDEAYMNKVELESRLEGLTDEINFLRQLYEEEIRELQSQISDTSVVLSMDNSRSLDMDSIIAEVKAQYEDIANRSRAEAESMYQIKYEELQSLAGKHGDDLRRTKTEISEMNRNISRLQAEIEGLKGQRASLEAAIADAEQRGELAIKDANAKLSELEAALQRAKQDMARQLREYQELMNVKLALDIEIATYRKLLEGEESRLESGMQNMSIHTKTTSGYAGGLSSAYGGLTSPGLSYSLGSSFGSGAGSSSFSRTSSSRAVVVKKIETRDGKLVSESSDVLPKXTAAAAPPSLPLLRCPRAWEGGRYAG

SEQ ID NO: 1503 - protein, 1794 aa, Homo Sapiens
  misc_feature (1787)..(1787): Xaa can be any naturally occurring amino acid
MGLLQLLAFSFLALCRARVRAQEPEFSYGCAEGSCYPATGDLLIGRAQKLSVTSTCGLHKPEPYCIVSHLQEDKKCFICNSQDPYHETLNPDSHLIENVVTTFAPNRLKIWWQSENGVENVTIQLDLEAEFHFTHLIMTFKTFRPAAMLIERSSDFGKTWGVYRYFAYDCEASFPGISTGPMKKVDDIICDSRYSDIEPSTEGEVIFRALDPAFKIEDPYSPRIQNLLKITNLRIKFVKLHTLGDNLLDSRMEIREKYYYAVYDMVVRGNCFCYGHASECAPVDGFNEEVEGMVHGHCMCRHNTKGLNCELCMDFYHDLPWRPAEGRNSNACKKCNCNEHSISCHFDMAVYLATGNVSGGVCDDCQHNTMGRNCEQCKPFYYQHPERDIRDPNFCERCTCDPAGSQNEGICDSYTDFSTGLIAGQCRCKLNVEGEHCDVCKEGFYDLSSEDPFGCKSCACNPLGTIPGGNPCDSETGHCYCKRLVTGQHCDQCLPEHWGLSNDLDGCRPCDCDLGGALNNSCFAESGQCSCRPHMIGRQCNEVEPGYYFATLDHYLYEAEEANLGPGVSIVERQYIQDRIPSWTGAGFVRVPEGAYLEFFIDNIPYSMEYDILIRYEPQLPDHWEKAVITVQRPGRIPTSSRCGNTIPDDDNQVVSLSPGSRYVVLPRPVCFEKGTNYTVRLELPQYTSSDSDVESPYTLIDSLVLMPYCKSLDIFTVGGSGDGVVTNSAWETFQRYRCLENSRSVVKTPMTDVCRNIIFSISALLHQTGLACECDPQGSLSSVCDPNGGQCQCRPNVVGRTCNRCAPGTFGFGPSGCKPCECHLQGSVNAFCNPVTGQCHCFQGVYARQCDRCLPGHWGFPSCQPCQCNGHADDCDPVTGECLNCQDYTMGHNCERCLAGYYGDPIIGSGDHCRPCPCPDGPDSGRQFARSCYQDPVTLQLACVCDPGYIGSRCDDCASGYFGNPSEVGGSCQPCQCHNNIDTTDPEACDKETGRCLKCLYHTEGEHCQFCRFGYYGDALRQDCRKCVCNYLGTVQEHCNGSDCQCDKATGQCLCLPNVIGQNCDRCAPNTWQLASGTGCDPCNCNAAHSFGPSCNEFTGQCQCMPGFGGRTCSECQELFWGDPDVECRACDCDPRGIETPQCDQSTGQCVCVEGVEGPRCDKCTRGYSGVFPDCTPCHQCFALWDVIIAELTNRTHRFLEKAKALKISGVIGPYRETVDSVERKVSEIKDILAQSPAAEPLKNIGNLFEEAEKLIKDVTEMMAQVEVKLSDTTSQSNSTAKELDSLQTEAESLDNTVKELAEQLEFIKNSDIRGALDSITKYFQMSLEAEERVNASTTEPNSTVEQSALMRDRVEDVMMERESQFKEKQEEQARLLDELAGKLQSLDLSAAAEMTCGTPPGASCSETECGGPNCRTDEGERKCGGPGCGGLVTVAHNAWQKAMDLDQDVLSALAEVEQLSKMVSEAKLRADEAKQSAEDILLKTNATKEKMDKSNEELRNLIKQIRNFLTQDSADLDSIEAVANEVLKMEMPSTPQQLQNLTEDIRERVESLSQVEVILQHSAADIARAEMLLEEAKRASKSATDVKVTADMVKEALEEAEKAQVAAEKAIKQADEDIQGTQNLLTSIESETAASEETLFNASQRISELERNVEELKRKAAQNSGEAEYIEKVVYTVKQSAEDVKKTLDGELDEKYKKVENLIAKKTEESADARRKAEMLQNEAKTLLAQANSKLQLLKDLERKYEDNQRYLEDKAQELARLEGEVRSLLKDISQKVAVYSTCLXQRRIKNG

SEQ ID NO: 1504 - protein, 240 aa, Homo Sapiens
  misc_feature (177)..(177): Xaa can be any naturally occurring amino acid
MKPLLLAVSLGLIAALQAHHLLASDEEIQDVSGTWYLKAMTVDREFPEMNLESVTPMTLTTLEGGNLEAKVTMLISGRCQEVKAVLEKTDEPGKYTADGGKHVAYIIRSHVKDHYIFYCEGELHGKPVRGVKLVGRDPKNNLEALEDFEKAAGARGLSTESILIPRQSETCSPGSDXGQGTPWLLSSPRTAPSSTSVIHRDMEKAPHPCRTRLAAPLPTTPRLPPALRPLSWFSIKSFSS

SEQ ID NO: 1505 - protein, 297 aa, Homo Sapiens
  misc_feature (168)..(168): Xaa can be any naturally occurring amino acid
MHWGTLCGFLWLWPYLFYVQAVPIQKVQDDTKTLIKTIVTRINDISHTQSVSSKQKVTGLDFIPGLHPILTLSKMDQTLAVYQQILTSMPSRNVIQISNDLENLRDLLHVLAFSKSCHLPWASGLETLDSLGGVLEASGYSTEVVALSRLQGSLQDMLWQLDLSPGCXGLEGHSSCKDYVKGRNSGFQVSPGLKSIAWTPLIQDSVNFPDSSKPLFQRHKTLSLLLLETKDIYTGSYSHQEGGPPSKEWAASGIPTKVFSHQQELSCPLLTHLPLTECLNVTRGDFREGRGVGRAFG

SEQ ID NO: 1506 - protein, 592 aa, Homo Sapiens
  misc_feature (586)..(586): Xaa can be any naturally occurring amino acid
MTPPRLFWVWLLVAGTQGVNDGDMRLADGGATNQGRVEIFYRGQWGTVCDNLWDLTDASVVCRALGFENATQALGRAAFGQGSGPIMLDEVQCTGTEASLADCKSLGWLKSNCRHERDAGVVCTNETRSTHTLDLSRELSEALGQIFDSQRGCDLSISVNVQGEDALGFCGHTVILTANLEAQALWKEPGSNVTMSVDAECVPMVRDLLRYFYSRRIDITLSSVKCFHKLASAYGARQLQGYCASLFAILLPQDPSFQMPLDLYAYAVATGDALLEKLCLQFLAWNFEALTQAEAWPSVPTDLLQLLLPRSDLAVPSELALLKAVDTWSWGERASHEEVEGLVEKIRFPMMLPEELFELQFNLSLYWSHEALFQKKTLQALEFHTVPFQLLARYKGLNLTEDTYKPRIYTSPTWSAFVTDSSWSARKSQLVYQSRRGPLVKYSSDYFQAPSDYRYYPYQSFQTPQHPSFLFQDKRVSWSLVYLPTIQSCWNYGFSCSSDELPVLGLTKSGGSDRTIAYENKALMLCEGLFVADVTDFEGWKAAIPSALDTNSSKSTSSFPCPAGHFNGFRTVIRPFYLTNSSGVDXTRGQGW

SEQ ID NO: 1507 - protein, 235 aa, Homo Sapiens
  misc_feature (203)..(203): Xaa can be any naturally occurring amino acid
MKVLAAGVVPLLLVLHWKHGAGSPLPITPVNATCAIRHPCHNNLMNQIRSQLAQLNGSANALFILYYTAQGEPFPNNLDKLCGPNVTDFPPFHANGTEKAKLVELYRIVVYLGTSLGNITRDQKILNPSALSLHSKLNATADILRGLLSNVLCRLCSKYHVGHVDVTYGPDTSGKDVFQKKKLGCQLLGKYKQIIAVLAQAFXQEVLKCAVNRGISGVGSRCGGLSKGGWGPGHR

SEQ ID NO: 1508 - protein, 689 aa, Homo Sapiens
  misc_feature (648)..(648): Xaa can be any naturally occurring amino acid
MRLTLLCCTWREERMGEEGSELPVCASCGQRIYDGQYLQALNADWHADCFRCCDCSASLSHQYYEKDGQLFCKKDYWARYGESCHGCSEQITKGLVMVAGELKYHPECFICLTCGTFIGDGDTYTLVEHSKLYCGHCYYQTVVTPVIEQILPDSPGSHLPHTVTLVSIPASSHGKRGLSVSIDPPHGPPGCGTEHSHTVRVQGVDPGCMSPDVKNSIHVGDRILEINGTPIRNVPLDEIDLLIQETSRLLQLTLEHDPHDTLGHGLGPETSPLSSPAYTPSGEAGSSARQKPVLRSCSIDRSPGAGSLGSPASQRKDLGRSESLRVVCRPHRIFRPSDLIHGEVLGKGCFGQAIKVTHRETGEVMVMKELIRFDEETQRTFLKEVKVMRCLEHPNVLKFIGVLYKDKRLNFITEYIKGGTLRGIIKSMDSQYPWSQRVSFAKDIASGMAYLHSMNIIHRDLNSHNCLVRENKNVVVADFGLARLMVDEKTQPEGLRSLKKPDRKKRYTVVGNPYWMAPEMINGRSYDEKVDVFSFGIVLCEIIGRVNADPDYLPRTMDFGLNVRGFLDRYCPPNCPPSFFPITVRCCDLDPEKRPSFVKLEHWLETLRMHLAGHLPLGPQLEQLDRGFWETYRRGESGLPAHPEVPDXARATQLPLSPPLENPPPPDSSAGGGPQLGQWGPRLLLRARP

SEQ ID NO: 1509 - protein, 1620 aa, Homo Sapiens
  misc_feature (1614)..(1614): Xaa can be any naturally occurring amino acid
MGAVLRSLLACSFCVLLRAAPLLLYANRRDLRLVDATNGKENATIVVGGLEDAAAVDFVFSHGLIYWSDVSEEAIKRTEFNKTESVQNVVVSGLLSPDGLACDWLGEKLYWTDSETNRIEVSNLDGSLRKVLFWQELDQPRAIALDPSSGFMYWTDWGEVPKIERAGMDGSSRFIIINSEIYWPNGLTLDYEEQKLYWADAKLNFIHKSNLDGTNRQAVVKGSLPHPFALTLFEDILYWTDWSTHSILACNKYTGEGLREIHSDIFSPMDIHAFSQQRQPNATNPCGIDNGGCSHLCLMSPVKPFYQCACPTGVKLLENGKTCKDGATELLLLARRTDLRRISLDTPDFTDIVLQLEDIRHAIAIDYDPVEGYIYWTDDEVRAIRRSFIDGSGSQFVVTAQIAHPDGIAVDWVARNLYWTDTGTDRIEVTRLNGTMRKILISEDLEEPRAIVLDPMVGYMYWTDWGEIPKIERAALDGSDRVVLVNTSLGWPNGLALDYDEGKIYWGDAKTDKIEVMNTDGTGRRVLVEDKIPHIFGFTLLGDYVYWTDWQRRSIERVHKRSAEREVIIDQLPDLMGLKATNVHRVIGSNPCAEENGGCSHLCLYRPQGLRCACPIGFELISDMKTCIVPEAFLLFSRRADIRRISLETNNNNVAIPLTGVKEASALDFDVTDNRIYWTDISLKTISRAFMNGSALEHVVEFGLDYPEGMAVDWLGKNLYWADTGTNRIEVSKLDGQHRQVLVWKDLDSPRALALDPAEGFMYWTEWGGKPKIDRAAMDGSERTTLVPNVGRANGLTIDYAKRRLYWTDLDTNLIESSNMLGLNREVIADDLPHPFGLTQYQDYIYWTDWSRRSIERANKTSGQNRTIIQGHLDYVMDILVFHSSRQSGWNECASSNGHCSHLCLAVPVGGFVCGCPAHYSLNADNRTCSAPTTFLLFSQKSAINRMVIDEQQSPDIILPIHSLRNVRAIDYDPLDKQLYWIDSRQNMIRKAQEDGSQGFTVVVSSVPSQNLEIQPYDLSIDIYSRYIYWTCEATNVINVTRLDGRSVGVVLKGEQDRPRAVVVNPEKGYMYFTNLQERSPKIERAALDGTEREVLFFSGLSKPIALALDSRLGKLFWADSDLRRIESSDLSGANRIVLEDSNILQPVGLTVFENWLYWIDKQQQMIEKIDMTGREGRTKVQARIAQLSDIHAVKELNLQEYRQHPCAQDNGGCSHICLVKGDGTTRCSCPMHLVLLQDELSCGEPPTCSPQQFTCFTGEIDCIPVAWRCDGFTECEDHSDELNCPVCSESQFQCASGQCIDGALRCNGDANCQDKSDEKNCEVLCLIDQFRCANGQCIGKHKKCDHNVDCSDKSDELDCYPTEEPAPQATNTVGSVIGVIVTIFVSGTVYFICQRMLCPRMKGDGETMTNDYVVHGPASVPLGYVPHPSSLSGSLPGMSRGKSMISSLSIMGGSSGPPYDRAHVTGASSSSSSSTKGTYFPAILNPPPSPATERSHYTMEFGYSSNSPSTHRSYSYRPYSYRHFAPPTTPCSTDVCDSDYAPSRRMTSVATAKGYTSDLNYDSEPVPPPPTPRSQYLSAEENYESCPPSPYTERSYSHHLYPPPPSPCTDSSXGGALLL

SEQ ID NO: 1510 - protein, 180 aa, Homo Sapiens
  misc_feature (144)..(144): Xaa can be any naturally occurring amino acid
MQHRGFLLLTLLALLALTSAVAKKKDKVKKGGPGSECAEWAWGPCTPSSKDCGVGFREGTCGAQTQRIRCRVPCNWKKEFGADCKYKFENWGACDGGTGTKVRQGTLKKARYNAQCQETIRVTKPCTPKTKAKAKAKKGKGKDXTPSLDAKEPLVSHGAWPTPSLSQARDVTHQCLLSAR

SEQ ID NO: 1511 - protein, 1601 aa, Homo Sapiens
  misc_feature (1582)..(1582): Xaa can be any naturally occurring amino acid
MKAQGETEESEKLSKMSSLLERLHAKFNQNRPWSETIKLVRQVMEKRVVMSSGGHQHLVSCLETLQKALKVTSLPAMTDRLESIARQNGLGSHLSASGTECYITSDMFYVEVQLDPAGQLCDVKVAHHGENPVSCPELVQQLREKNFDEFSKHLKGLVNLYNLPGDNKLKTKMYLALQSLEQDLSKMAIMYWKATNAGPLDKILHGSVGYLTPRSGGHLMNLKYYVSPSDLLDDKTASPIILHENNVSRSLGMNASVTIEGTSAVYKLPIAPLIMGSHPVDNKWTPSFSSITSANSVDLPACFFLKFPQPIPVSRAFVQKLQNCTGIPLFETQPTYAPLYELITQFELSKDPDPIPLNHNMRFYAALPGQQHCYFLNKDAPLPDGRSLQGTLVSKITFQHPGRVPLILNLIRHQVAYNTLIGSCVKRTILKEDSPGLLQFEVCPLSESRFSVSFQHPVNDSLVCVVMDVQDSTHVSCKLYKGLSDALICTDDFIAKVVQRCMSIPVTMRAIRRKAETIQADTPALSLIAETVEDMVKKNLPPASSPGYGMTTGNNPMSGTTTPTNTFPGGPITTLFNMSMSIKDRHESVGHGEDFSKVSQNPILTSLLQITGNGGSTIGSSPTPPHHTPPPVSSMAGNTKNHPMLMNLLKDNPAQDFSTLYGSSPLERQNSSSGSPRMEICSGSNKTKKKKSSRLPPEKPKHQTEDDFQRELFSMDVDSQNPIFDVNMTADTLDTPHITPAPSQCSTPPTTYPQPVPHPQPSIQRMVRLSSSDSIGPDVTDILSDIAEEASKLPSTSDDCPAIGTPLRDSSSSGHSQSTLFDSDVFQTNNNENPYTDPADLIADAAGSPSSDSPTNHFFHDGVDFNPDLLNSQSQSGFGEEYFDESSQSGDNDDFKGFASQALNTLGVPMLGGDNGETKFKGNNQADTVDFSIISVAGKALAPADLMEHHSGSQGPLLTTGDLGKEKTQKRVKEGNGTSNSTLSGPGLDSKPGKRSRTPSNDGKSKDKPPKRKKADTEGKSPSHSSSNRPFTPPTSTGGSKSPGSAGRSQTPPGVATPPIPKITIQIPKGTVMVGKPSSHSQYTSSGSVSSSGSKSHHSHSSSSSSSASTSGKMKSSKSEGSSSSKLSSSMYSSQGSSGSSQSKNSSQSGGKPGSSPITKHGLSSGSSSTKMKPQGKPSSLMNPSLSKPNISPSHSRPPGGSDKLASPMKPVPGTPPSSKAKSPISSGSGGSHMSGTSSSSGMKSSSGLGSSGSLSQKTPPSSNSCTASSSSFSSSGSSMSSSQNQHGSSKGKSPSRNKKPSLTAVIDKLKHGVVTSGPGGEDPLDGQMGVSTNSSSHPMSSKHNMSGGEFQGKREKSDKDKSKVSTSGSSVDSSKKTSESKNVGSTGVAKIIISKHDGGSPSIKAKVTLQKPGESSGEGLRPQMASSKNYGSPLISGSTPKHERGSPSHSKSPAYTPQNLDSESESGSSIAEKSYQNSPSSDDGIRPLPEYSTEKHKKHKKEKKKVKDKDRDRDRDKDRDKKKSHSIKPESWSKSPISSDQSLSMTSNTILSADRPSRLSPDFMIGEEDDDLMDVALIGNXEPYFLKETGPEEKKLLISL

SEQ ID NO: 1512 - protein, 411 aa, Homo Sapiens
  misc_feature (388)..(388): Xaa can be any naturally occurring amino acid
MPRPRLLAALCGALLCAPSLLVALDICSKNPCHNGGLCEEISQEVRGDVFPSYTCTCLKGYAGNHCETKCVEPLGMENGNIANSQIAASSVRVTFLGLQHWVPELARLNRAGMVNAWTPSSNDDNPWIQVNLLRRMWVTGVVTQGASRLASHEYLKAFKVAYSLNGHEFDFIHDVNKKHKEFVGNWNKNAVHVNLFETPVEAQYVRLYPTSCHTACTLRFELLGCELNGCANPLGLKNNSIPDKQITASSSYKTWGLHLFSWNPSYARLDKQGNFNAWVAGSYGNDQWLQVDLGSSKEVTGIITQGARNFGSVQFVASYKVAYSNDSANWTEYQDPRTGSSKIFPGNWDNHSHKKNLFETPILARYVRILPVAWHNRIALRLELLGCXWPPATPRSSCFPWARCLLASQPL

SEQ ID NO: 1513 - protein, 3271 aa, Homo Sapiens
  misc_feature (3257)..(3257): Xaa can be any naturally occurring amino acid
MWPTRRLVTIKRSGVDGPHFPLSLSTCLFGRGIECDIRIQLPVVSKQHCKIEIHEQEAILHNFSSTNPTQVNGSVIDEPVRLKHGDVITIIDRSFRYENESLQNGRKSTEFPRKIREQEPARRVSRSSFSSDPDEKAQDSKAYSKITEGKVSGNPQVHIKNVKEDSTADDSKDSVAQGTTNVHSSEHAGRNGRNAADPISGDFKEISSVKLVSRYGELKSVPTTQCLDNSKKNESPFWKLYESVKKELDVKSQKENVLQYCRKSGLQTDYATEKESADGLQGETQLLVSRKSRPKSGGSGHAVAEPASPEQELDQNKGKGRDVESVQTPSKAVGASFPLYEPAKMKTPVQYSQQQNSPQKHKNKDLYTTGRRESVNLGKSEGFKAGDKTLTPRKLSTRNRTPAKVEDAADSATKPENLSSKTRGSIPTDVEVLPTETEIHNEPFLTLWLTQVERKIQKDSLSKPEKLGTTAGQMCSGLPGLSSVDINNFGDSINESEGIPLKRRRVSFGGHLRPELFDENLPPNTPLKRGEAPTKRKSLVMHTPPVLKKIIKEQPQPSGKQESGSEIHVEVKAQSLVISPPAPSPRKTPVASDQRRRSCKTAPASSSKSQTEVPKRGGRKSGNLPSKRVSISRSQHDILQMICSKRRSGASEANLIVAKSWADVVKLGAKQTQTKVIKHGPQRSMNKRQRRPATPKKPVGEVHSQFSTGHANSPCTIIIGKAHTEKVHVPARPYRVLNNFISNQKMDFKEDLSGIAEMFKTPVKEQPQLTSTCHIAISNSENLLGKQFQGTDSGEEPLLPTSESFGGNVFFSAQNAAKQPSDKCSASPPLRRQCIRENGNVAKTPRNTYKMTSLETKTSDTETEPSKTVSTANRSGRSTEFRNIQKLPVESKSEETNTEIVECILKRGQKATLLQQRREGEMKEIERPFETYKENIELKENDEKMKAMKRSRTWGQKCAPMSDLTDLKSLPDTELMKDTARGQNLLQTQDHAKAPKSEKGKITKMPCQSLQPEPINTPTHTKQQLKASLGKVGVKEELLAVGKFTRTSGETTHTHREPAGDGKSIRTFKESPKQILDPAARVTGMKKWPRTPKEEAQSLEDLAGFKELFQTPGPSEESMTDEKTTKIACKSPPPESVDTPTSTKQWPKRSLRKADVEEEFLALRKLTPSAGKAMLTPKPAGGDEKDIKAFMGTPVQKLDLAGTLPGSKRQLQTPKEKAQALEDLAGFKELFQTPGHTEELVAAGKTTKIPCDSPQSDPVDTPTSTKQRPKRSIRKADVEGELLACRNLMPSAGKAMHTPKPSVGEEKDIIIFVGTPVQKLDLTENLTGSKRRPQTPKEEAQALEDLTGFKELFQTPGHTEEAVAAGKTTKMPCESSPPESADTPTSTRRQPKTPLEKRDVQKELSALKKLTQTSGETTHTDKVPGGEDKSINAFRETAKQKLDPAASVTGSKRHPKTKEKAQPLEDLAGLKELFQTPVCTDKPTTHEKTTKIACRSQPDPVDTPTSSKPQSKRSLRKVDVEEEFFALRKRTPSAGKAMHTPKPAVSGEKNIYAFMGTPVQKLDLTENLTGSKRRLQTPKEKAQALEDLAGFKELFQTRGHTEESMTNDKTAKVACKSSQPDPDKNPASSKRRLKTSLGKVGVKEELLAVGKLTQTSGETTHTHTEPTGDGKSMKAFMESPKQILDSAASLTGSKRQLRTPKGKSEVPEDLAGFIELFQTPSHTKESMTNEKTTKVSYRASQPDLVDTPTSSKPQPKRSLRKADTEEEFLAFRKQTPSAGKAMHTPKPAVGEEKDINTFLGTPVQKLDQPGNLPGSNRRLQTRKEKAQALEELTGFRELFQTPCTDNPTTDEKTTKKILCKSPQSDPADTPTNTKQRPKRSLKKADVEEEFLAFRKLTPSAGKAMHTPKAAVGEEKDINTFVGTPVEKLDLLGNLPGSKRRPQTPKEKAKALEDLAGFKELFQTPGHTEESMTDDKITEVSCKSPQPDPVKTPTSSKQRLKISLGKVGVKEEVLPVGKLTQTSGKTTQTHRETAGDGKSIKAFKESAKQMLDPANYGTGMERWPRTPKEEAQSLEDLAGFKELFQTPDHTEESTTDDKTTKIACKSPPPESMDTPTSTRRRPKTPLGKRDIVEELSALKQLTQTTHTDKVPGDEDKGINVFRETAKQKLDPAASVTGSKRQPRTPKGKAQPLEDLAGLKELFQTPICTDKPTTHEKTTKIACRSPQPDPVGTPTIFKPQSKRSLRKADVEEESLALRKRTPSVGKAMDTPKPAGGDEKDMKAFMGTPVQKLDLPGNLPGSKRWPQTPKEKAQALEDLAGFKELFQTPGTDKPTTDEKTTKIACKSPQPDPVDTPASTKQRPKRNLRKADVEEEFLALRKRTPSAGKAMDTPKPAVSDEKNINTFVETPVQKLDLLGNLPGSKRQPQTPKEKAEALEDLVGFKELFQTPGHTEESMTDDKITEVSCKSPQPESFKTSRSSKQRLKIPLVKVDMKEEPLAVSKLTRTSGETTQTHTEPTGDSKSIKAFKESPKQILDPAASVTGSRRQLRTRKEKARALEDLVDFKELFSAPGHTEESMTIDKNTKIPCKSPPPELTDTATSTKRCPKTRPRKEVKEELSAVERLTQTSGQSTHTHKEPASGDEGIKVLKQRAKKKPNPVEEEPSRRRPRAPKEKAQPLEDLAGFTELSETSGHTQESLTAGKATKIPCESPPLEVVDTTASTKRHLRTRVQKVQVKEEPSAVKFTQTSGETTDADKEPAGEDKGIKALKESAKQTPAPAASVTGSRRRPRAPRESAQAIEDLAGFKDPAAGHTEESMTDDKTTKIPCKSSPELEDTATSSKRRPRTRAQKVEVKEELLAVGKLTQTSGETTHTDKEPVGEGKGTKAFKQPAKRKLDAEDVIGSRRQPRAPKEKAQPLEDLASFQELSQTPGHTEELANGAADSFTSAPKQTPDSGKPLKISRRVLRAPKVEPVGDVVSTRDPVKSQSKSNTSLPPLPFKRGGGKDGSVTGTKRLRCMPAPEEIVEELPASKKQRVAPRARGKSSEPVVIMKRSLRTSAKRIEPAEELNSNDMKTNKEEHKLQDSVPENKGISLRSRRQNKTEAEQQITEVFVLAERIEINRNEKKPMKTSPEMDIQNPDDGARKPIPRDKVTENKRCLRSARQNESSQPKVAEESGGQKSAKVLMQNQKGKGEAGNSDSMCLRSRKTKSQPAASTLESKSVQRVTRSVKRCAENPKKAEDNVCVKKIRTRSHRDSEDIXQKNRTGKNIIKLVL

SEQ ID NO: 1514 - protein, 474 aa, Homo Sapiens
  misc_feature (470)..(470): Xaa can be any naturally occurring amino acid
MHSFPPLLLLLFWGVVSHSFPATLETQEQDVDLVQKYLEKYYNLKNDGRQVEKRRNSGPVVEKLKQMQEFFGLKVTGKPDAETLKVMKQPRCGVPDVAQFVLTEGNPRWEQTHLTYRIENYTPDLPRADVDHAIEKAFQLWSNVTPLTFTKVSEGQADIMISFVRGDHRDNSPFDGPGGNLAHAFQPGPGIGGDAHFDEDERWTNNFREYNLHRVAAHELGHSLGLSHSTDIGALMYPSYTFSGDVQLAQDDIDGIQAIYGRSQNPVQPIGPQTPKACDSKLTFDAITTIRGEVMFFKDRFYMRTNPFYPEVELNFISVFWPQLPNGLEAAYEFADRDEVRFFKGNKYWAVQGQNVLHGYPKDIYSSFGFPRTVKHIDAALSEENTGKTYFFVANKYWRYDEYKRSMDPGYPKMIAHDFPGIGHKVDAVFMKDGFFYFFHGTRQYKFDPKTKRILTLQKANSWFNCRKNXTLLI

SEQ ID NO: 1515 - protein, 475 aa, Homo Sapiens
  misc_feature (472)..(472): Xaa can be any naturally occurring amino acid
MHPGVLAAFLFLSWTHCRALPLPSGGDEDDLSEEDLQFAERYLRSYYHPTNLAGILKENAASSMTERLREMQSFFGLEVTGKLDDNTLDVMKKPRCGVPDVGEYNVFPRTLKWSKMNLTYRIVNYTPDMTHSEVEKAFKKAFKVWSDVTPLNFTRLHDGIADIMISFGIKEHGDFYPFDGPSGLLAHAFPPGPNYGGDAHFDDDETWTSSSKGYNLFLVAAHEFGHSLGLDHSKDPGALMFPIYTYTGKSHFMLPDDDVQGIQSLYGPGDEDPNPKHPKTPDKCDPSLSLDAITSLRGETMIFKDRFFWRLHPQQVDAELFLTKSFWPELPNRIDAAYEHPSHDLIFIFRGRKFWALNGYDILEGYPKKISELGLPKEVKKISAAVHFEDTGKTLLFSGNQVWRYDDTNHIMDKDYPRLIEEDFPGIGDKVDAVYEKNGYIYFFNGPIQFEYSIWSNRIVRVMPANSILWCXVSF

SEQ ID NO: 1516 - protein, 598 aa, Homo Sapiens
  misc_feature (583)..(583): Xaa can be any naturally occurring amino acid
MSPAPRPPRCLLLPLLTLGTALASLGSAQSSSFSPEAWLQQYGYLPPGDLRTHTQRSPQSLSAAIAAMQKFYGLQVTGKADADTMKAMRRPRCGVPDKFGAEIKANVRRKRYAIQGLKWQHNEITFCIQNYTPKVGEYATYEAIRKAFRVWESATPLRFREVPYAYIREGHEKQADIMIFFAEGFHGDSTPFDGEGGFLAHAYFPGPNIGGDTHFDSAEPWTVRNEDLNGNDIFLVAVHELGHALGLEHSSDPSAIMAPFYQWMDTENFVLPDDDRRGIQQLYGGESGFPTKMPPQPRTTSRPSVPDKPKNPTYGPNICDGNFDTVAMLRGEMFVFKERWFWRVRNNQVMDGYPMPIGQFWRGLPASINTAYERKDGKFVFFKGDKHWVFDEASLEPGYPKHIKELGRGLPTDKIDAALFWMPNGKTYFFRGNKYYRFNEELRAVDSEYPKNIKVWEGIPESPRGSFMGSDEVFTYFYKGNKYWKFNNQKLKVEPGYPKSALRDWMGCPSGGRPDEGTEEETEVIIIEVDEEGGGAVSAAAVVLPVLLLLLVLAVGLAVFFFRRHGTPRRLLYCQRSLLDKVXRPPPARPLLPQGLCL

SEQ ID NO: 1517 - protein, 682 aa, Homo Sapiens
  misc_feature (661)..(661): Xaa can be any naturally occurring amino acid
MEALMARGALTGPLRALCLLGCLLSHAAAAPSPIIKFPGDVAPKTDKELAVQYLNTFYGCPKESCNLFVLKDTLKKMQKFFGLPQTGDLDQNTIETMRKPRCGNPDVANYNFFPRKPKWDKNQITYRIIGYTPDLDPETVDDAFARAFQVWSDVTPLRFSRIHDGEADIMINFGRWEHGDGYPFDGKDGLLAHAFAPGTGVGGDSHFDDDELWTLGEGQVVRVKYGNADGEYCKFPFLFNGKEYNSCTDTGRSDGFLWCSTTYNFEKDGKYGFCPHEALFTMGGNAEGQPCKFPFRFQGTSYDSCTTEGRTDGYRWCGTTEDYDRDKKYGFCPETAMSTVGGNSEGAPCVFPFTFLGNKYESCTSAGRSDGKMWCATTANYDDDRKWGFCPDQGYSLFLVAAHEFGHAMGLEHSQDPGALMAPIYTYTKNFRLSQDDIKGIQELYGASPDIDLGTGPTPTLGPVTPEICKQDIVFDGIAQIRGEIFFFKDRFIWRTVTPRDKPMGPLLVATFWPELPEKIDAVYEAPQEEKAVFFAGNEYWIYSASTLERGYPKPLTSLGLPPDVQRVDAAFNWSKNKKTYIFAGDKFWRYNEVKKKMDPGFPKLIADAWNAIPDNLDAVVDLQGGGHSYFFKGAYYLKLENQSLKSVKFGSIKSDWLGCXAGPGSHRPFLSTAFDTPGLEN

SEQ ID NO: 1518 - protein, 489 aa, Homo Sapiens
  misc_feature (478)..(478): Xaa can be any naturally occurring amino acid
MKSLPILLLLCVAVCSAYPLDGAARGEDTSMNLVQKYLENYYDLKKDVKQFVRRKDSGPVVKKIREMQKFLGLEVTGKLDSDTLEVMRKPRCGVPDVGHFRTFPGIPKWRKTHLTYRIVNYTPDLPKDAVDSAVEKALKVWEEVTPLTFSRLYEGEADIMISFAVREHGDFYPFDGPGNVLAHAYAPGPGINGDAHFDDDEQWTKDTTGTNLFLVAAHEIGHSLGLFHSANTEALMYPLYHSLTDLTRFRLSQDDINGIQSLYGPPPDSPETPLVPTEPVPPEPGTPANCDPALSFDAVSTLRGEILIFKDRHFWRKSLRKLEPELHLISSFWPSLPSGVDAAYEVTSKDLVFIFKGNQFWAIRGNEVRAGYPRGIHTLGFPPTVRKIDAAISDKEKNKTYFFVEDKYWRFDEKRNSMEPGFPKQIAEDFPGIDSKIDAVFEEFGFFYFFTGSSQLEFDPNAKKVTHTLKSNSWLNCXKRYVEGTIWAL

SEQ ID NO: 1519 - protein, 501 aa, Homo Sapiens
  misc_feature (468)..(468): Xaa can be any naturally occurring amino acid
MFSLKTLPFLLLLHVQISKAFPVSSKEKNTKTVQDYLEKFYQLPSNQYQSTRKNGTNVIVEKLKEMQRFFGLNVTGKPNEETLDMMKKPRCGVPDSGGFMLTPGNPKWERTNLTYRIRNYTPQLSEAEVERAIKDAFELWSVASPLIFTRISQGEADINIAFYQRDHGDNSPFDGPNGILAHAFQPGQGIGGDAHFDAEETWTNTSANYNLFLVAAHEFGHSLGLAHSSDPGALMYPNYAFRETSNYSLPQDDIDGIQAIYGLSSNPIQPTGPSTPKPCDPSLTFDAITTLRGEILFFKDRYFWRRHPQLQRVEMNFISLFWPSLPTGIQAAYEDFDRDLIFLFKGNQYWALSGYDILQGYPKDISNYGFPSSVQAIDAAVFYRSKTYFFVNDQFWRYDNQRQFMEPGYPKSISGAFPGIESKVDAVFQQEHFFHVFSGPRYYAFDLIAQRVTRVARGNKWLNCRYGXSKIKCGCIHFQNVEGKFSMHFRYIVSCLYFSQY

SEQ ID NO: 1520 - protein, 754 aa, Homo Sapiens
  misc_feature (746)..(746): Xaa can be any naturally occurring amino acid
MGVPFFSSLRCMVDLGPCWAGGLTAEMKLLLALAGLLAILATPQPSEGAAPAVLGEVDTSLVLSSMEEAKQLVDKAYKERRESIKQRLRSGSASPMELLSYFKQPVAATRTAVRAADYLHVALDLLERKLRSLWRRPFNVTDVLTPAQLNVLSKSSGCAYQDVGVTCPEQDKYRTITGMCNNRRSPTLGASNRAFVRWLPAEYEDGFSLPYGWTPGVKRNGFPVALARAVSNEIVRFPTDQLTPDQERSLMFMQWGQLLDHDLDFTPEPAARASFVTGVNCETSCVQQPPCFPLKIPPNDPRIKNQADCIPFFRSCPACPGSNITIRNQINALTSFVDASMVYGSEEPLARNLRNMSNQLGLLAVNQRFQDNGRALLPFDNLHDDPCLLTNRSARIPCFLAGDTRSSEMPELTSMHTLLLREHNRLATELKSLNPRWDGERLYQEARKIVGAMVQIITYRDYLPLVLGPTAMRKYLPTYRSYNDSVDPRIANVFTNAFRYGHTLIQPFMFRLDNRYQPMEPNPRVPLSRVFFASWRVVLEGGIDPILRGLMATPAKLNRQNQIAVDEIRERLFEQVMRIGLDLPALNMQRSRDHGLPGYNAWRRFCGLPQPETVGQLGTVLRNLKLARKLMEQYGTPNNIDIWMGGVSEPLKRKGRVGPLLACIIGTQFRKLRDGDRFWWENEGVFSMQQRQALAQISLPRIICDNTGITTVSKNNIFMSNSYPRDFVNCSTLPALNLASWREASXRPGKGVQQ

SEQ ID NO: 1521 - protein, 373 aa, Homo Sapiens
  misc_feature (359)..(359): Xaa can be any naturally occurring amino acid
MEQWDHFHNQQEDTDSCSESVKFDARSMTALLPPNPKNSPSLQEKLKSFKAALIALYLLVFAVLIPLIGIVAAQLLKWETKNCSVSSTNANDITQSLTGKGNDSEEEMRFQEVFMEHMSNMEKRIQHILDMEANLMDTEHFQNFSMTTDQRFNDILLQLSTLFSSVQGHGNAIDEISKSLISLNTTLLDLQLNIENLNGKIQENTFKQQEEISKLEERVYNVSAEIMAMKEEQVHLEQEIKGEVKVLNNITNDLRLKDWEHSQTLRNITLIQGPPGPPGEKGDRGPTGESGPRGFPGPIGPPGLKGDRGAIGFPGSRGLPGYAGRPGNSGPKGQKGEKGSGNTLRPVQLTDHIRAGPSXDQVGWAGHPLLPSH

SEQ ID NO: 1522 - protein, 474 aa, Homo Sapiens
  misc_feature (452)..(452): Xaa can be any naturally occurring amino acid
MEQWDHFHNQQEDTDSCSESVKFDARSMTALLPPNPKNSPSLQEKLKSFKAALIALYLLVFAVLIPLIGIVAAQLLKWETKNCSVSSTNANDITQSLTGKGNDSEEEMRFQEVFMEHMSNMEKRIQHILDMEANLMDTEHFQNFSMTTDQRFNDILLQLSTLFSSVQGHGNAIDEISKSLISLNTTLLDLQLNIENLNGKIQENTFKQQEEISKLEERVYNVSAEIMAMKEEQVHLEQEIKGEVKVLNNITNDLRLKDWEHSQTLRNITLIQGPPGPPGEKGDRGPTGESGPRGFPGPIGPPGLKGDRGAIGFPGSRGLPGYAGRPGNSGPKGQKGEKGSGNTLTPFTKVRLVGGSGPHEGRVEILHSGQWGTICDDRWEVRVGQVVCRSLGYPGVQAVHKAAHFGQGTGPIWLNEVFCFGRESSIEECKIRQWGTRACSHSEDAGVTCTLXCIIFSFTTMKSLLKNDFITLFL

SEQ ID NO: 1523 - protein, 261 aa, Homo Sapiens
  misc_feature (256)..(256): Xaa can be any naturally occurring amino acid
MTPGTQSPFFLLLLLTVLTVVTGSGHASSTPGGEKETSATQRSSVPSSTEKNAFNSSLEDPSTDYYQELQRDISEMFLQIYKQGGFLGLSNIKFRPGSVVVQLTLAFREGTINVHDVETQFNQYKTEAASRYNLTISDVSVSDVPFPFSAQSGAGVPGWGIALLVLVCVLVALAIVYLIALAVCQCRRKNYGQLDIFPARDTYHPMSEYPTYHTHGRYVPPSSTDRSPYEKVSAGNGGSSLSYTNPAVAATSANLXGHVAR

SEQ ID NO: 1524 - protein, 279 aa, Homo Sapiens
  misc_feature (274)..(274): Xaa can be any naturally occurring amino acid
MTPGTQSPFFLLLLLTVLTVVTGSGHASSTPGGEKETSATQRSSVPSSTEKNALSTGVSFFFLSFHISNLQFNSSLEDPSTDYYQELQRDISEMFLQIYKQGGFLGLSNIKFRPGSVVVQLTLAFREGTINVHDVETQFNQYKTEAASRYNLTISDVSVSDVPFPFSAQSGAGVPGWGIALLVLVCVLVALAIVYLIALAVCQCRRKNYGQLDIFPARDTYHPMSEYPTYHTHGRYVPPSSTDRSPYEKVSAGNGGSSLSYTNPAVAATSANLXGHVAR

SEQ ID NO: 1525 - protein, 424 aa, Homo Sapiens
  misc_feature (412)..(412): Xaa can be any naturally occurring amino acid
MLLKTVLLLGHVAQVLMLDNGLLQTPPMGWLAWERFRCNINCDEDPKNCISEQLFMEMADRMAQDGWRDMGYTYLNIDDCWIGGRDASGRLMPDPKRFPHGIPFLADYVHSLGLKLGIYADMGNFTCMGYPGTTLDKVVQDAQTFAEWKVDMLKLDGCFSTPEERAQGYPKMAAALNATGRPIAFSCSWPAYEGGLPPRVNYSLLADICNLWRNYDDIQDSWWSVLSILNWFVEHQDILQPVAGPGHWNDPDMLLIGNFGLSLEQSRAQMALWTVLAAPLLMSTDLRTISAQNMDILQNPLMIKINQDPLGIQGRRIHKEKSLIEVYMRPLSNKASALVFFSCRTDMPYRYHSSLGQLNFTGSVIYEAQDVYSGDIISGLRDETNFTVIINPSGVVMWYLYPIKNLEMSQQXGAGTCDRLWWHH

SEQ ID NO: 1526 - protein, 1420 aa, Homo Sapiens
  misc_feature (1404)..(1404): Xaa can be any naturally occurring amino acid
MATQQKASDERISQFDHNLLPELSALLGLDAVQLAKELEEEEQKERAKMQKGYNSQMRSEAKRLKTFVTYEPYSSWIPQEMAAAGFYFTGVKSGIQCFCCSLILFGAGLTRLPIEDHKRFHPDCGFLLNKDVGNIAKYDIRVKNLKSRLRGGKMRYQEEEARLASFRNWPFYVQGISPCVLSEAGFVFTGKQDTVQCFSCGGCLGNWEEGDDPWKEHAKWFPKCEFLRSKKSSEEITQYIQSYKGFVDITGEHFVNSWVQRELPMASAYCNDSIFAYEELRLDSFKDWPRESAVGVAALAKAGLFYTGIKDIVQCFSCGGCLEKWQEGDDPLDDHTRCFPNCPFLQNMKSSAEVTPDLQSRGELCELLETTSESNLEDSIAVGPIVPEMAQGEAQWFQEAKNLNEQLRAAYTSASFRHMSLLDISSDLATDHLLGCDLSIASKHISKPVQEPLVLPEVFGNLNSVMCVEGEAGSGKTVLLKKIAFLWASGCCPLLNRFQLVFYLSLSSTRPDEGLASIICDQLLEKEGSVTEMCVRNIIQQLKNQVLFLLDDYKEICSIPQVIGKLIQKNHLSRTCLLIAVRTNRARDIRRYLETILEIKAFPFYNTVCILRKLFSHNMTRLRKFMVYFGKNQSLQKIQKTPLFVAAICAHWFQYPFDPSFDDVAVFKSYMERLSLRNKATAEILKATVSSCGELALKGFFSCCFEFNDDDLAEAGVDEDEDLTMCLMSKFTAQRLRPFYRFLSPAFQEFLAGMRLIELLDSDRQEHQDLGLYHLKQINSPMMTVSAYNNFLNYVSSLPSTKAGPKIVSHLLHLVDNKESLENISENDDYLKHQPEISLQMQLLRGLWQICPQAYFSMVSEHLLVLALKTAYQSNTVAACSPFVLQFLQGRTLTLGALNLQYFFDHPESLSLLRSIHFPIRGNKTSPRAHFSVLETCFDKSQVPTIDQDYASAFEPMNEWERNLAEKEDNVKSYMDMQRRASPDLSTGYWKLSPKQYKIPCLEVDVNDIDVVGQDMLEILMTVFSASQRIELHLNHSRGFIESIRPALELSKASVTKCSISKLELSAAEQELLLTLPSLESLEVSGTIQSQDQIFPNLDKFLCLKELSVDLEGNINVFSVIPEEFPNFHHMEKLLIQISAEYDPSKLVKLIQNSPNLHVFHLKCNFFSDFGSLMTMLVSCKKLTEIKFSDSFFQAVPFVASLPNFISLKILNLEGQQFPDEETSEKFAYILGSLSNLEELILPTGDGIYRVAKLIIQQCQQLHCLRVLSFFKTLNDDSVVEIAKVAISGGFQKLENLKLSINHKITEEGYRNFFQALDNMPNLQELDISRHFTECIKAQATTVKSLSQCVLRLPRLIRLNMLSWLLDADDIALLNVMKERHPQSKYLTILQKWILPFSPIIQKXKIQLKTAESIICLGAY

SEQ ID NO: 1527 - protein, 859 aa, Homo Sapiens
  misc_feature (849)..(849): Xaa can be any naturally occurring amino acid
MLQTKDLIWTLFFLGTAVSLQVDIVPSQGEISVGESKFFLCQVAGDAKDKDISWFSPNGEKLTPNQQRISVVWNDDSSSTLTIYNANIDDAGIYKCVVTGEDGSESEATVNVKIFQKLMFKNAPTPQEFREGEDAVIVCDVVSSLPPTIIWKHKGRDVILKKDVRFIVLSNNYLQIRGIKKTDEGTYRCEGRILARGEINFKDIQVIVNVPPTIQARQNIVNATANLGQSVTLVCDAEGFPEPTMSWTKDGEQIEQEEDDEKYIFSDDSSQLTIKKVDKNDEAEYICIAENKAGEQDATIHLKVFAKPKITYVENQTAMELEEQVTLTCEASGDPIPSITWRTSTRNISSEEKTLDGHMVVRSHARVSSLTLKSIQYTDAGEYICTASNTIGQDSQSMYLEVQYAPKLQGPVAVYTWEGNQVNITCEVFAYPSATISWFRDGQLLPSSNYSNIKIYNTPSASYLEVTPDSENDFGNYNCTAVNRIGQESLEFILVQADTPSSPSIDQVEPYSSTAQVQFDEPEATGGVPILKYKAEWRAVGEEVWHSKWYDAKEASMEGIVTIVGLKPETTYAVRLAALNGKGLGEISAASEFKTQPVQGEPSAPKLEGQMGEDGNSIKVNLIKQDDGGSPIRHYLVRYRALSSEWKPEIRLPSGSDHVMLKSLDWNAEYEVYVVAENQQGKSKAAHFVFRTSAQPTAIPANGSPTSGLSTGAIVGILIVIFVLLLVVVDITCYFLNKCGLFMCIAVNLCGKAGPGAKGKDMEEGKAAFSKDESKEPIVEVRTEEERTPNHDGGKHTEPNETTPLTEPEKGPVEAKPECQETETKPAPAEVKTVPNDATQTKENESKAXWVKRTEQRSK

SEQ ID NO: 1528 - protein, 2427 aa, Homo Sapiens
  misc_feature (2322)..(2322): Xaa can be any naturally occurring amino acid
MGPGARGRRRRRRPMSPPPPPPPVRALPLLLLLAGPGAAAPPCLDGSPCANGGRCTQLPSREAACLCPPGWVGERCQLEDPCHSGPCAGRGVCQSSVVAGTARFSCRCPRGFRGPDCSLPDPCLSSPCAHGARCSVGPDGRFLCSCPPGYQGRSCRSDVDECRVGEPCRHGGTCLNTPGSFRCQCPAGYTGPLCENPAVPCAPSPCRNGGTCRQSGDLTYDCACLPGFEGQNCEVNVDDCPGHRCLNGGTCVDGVNTYNCQCPPEWTGQFCTEDVDECQLQPNACHNGGTCFNTLGGHSCVCVNGWTGESCSQNIDDCATAVCFHGATCHDRVASFYCACPMGKTGLLCHLDDACVSNPCHEDAICDTNPVNGRAICTCPPGFTGGACDQDVDECSIGANPCEHLGRCVNTQGSFLCQCGRGYTGPRCETDVNECLSGPCRNQATCLDRIGQFTCICMAGFTGTYCEVDIDECQSSPCVNGGVCKDRVNGFSCTCPSGFSGSTCQLDVDECASTPCRNGAKCVDQPDGYECRCAEGFEGTLCDRNVDDCSPDPCHHGRCVDGIASFSCACAPGYTGTRCESQVDECRSQPCRHGGKCLDLVDKYLCRCPSGTTGVNCEVNIDDCASNPCTFGVCRDGINRYDCVCQPGFTGPLCNVEINECASSPCGEGGSCVDGENGFRCLCPPGSLPPLCLPPSHPCAHEPCSHGICYDAPGGFRCVCEPGWSGPRCSQSLARDACESQPCRAGGTCSSDGMGFHCTCPPGVQGRQCELLSPCTPNPCEHGGRCESAPGQLPVCSCPQGWQGPRCQQDVDECAGPAPCGPHGICTNLAGSFSCTCHGGYTGPSCDQDINDCDPNPCLNGGSCQDGVGSFSCSCLPGFAGPRCARDVDECLSNPCGPGTCTDHVASFTCTCPPGYGGFHCEQDLPDCSPSSCFNGGTCVDGVNSFSCLCRPGYTGAHCQHEADPCLSRPCLHGGVCSAAHPGFRCTCLESFTGPQCQTLVDWCSRQPCQNGGRCVQTGAYCLCPPGWSGRLCDIRSLPCREAAAQIGVRLEQLCQAGGQCVDEDSSHYCVCPEGRTGSHCEQEVDPCLAQPCQHGGTCRGYMGGYMCECLPGYNGDNCEDDVDECASQPCQHGGSCIDLVARYLCSCPPGTLGVLCEINEDDCGPGPPLDSGPRCLHNGTCVDLVGGFRCTCPPGYTGLRCEADINECRSGACHAAHTRDCLQDPGGGFRCLCHAGFSGPRCQTVLSPCESQPCQHGGQCRPSPGPGGGLTFTCHCAQPFWGPRCERVARSCRELQCPVGVPCQQTPRGPRCACPPGLSGPSCRSFPGSPPGASNASCAAAPCLHGGSCRPAPLAPFFRCACAQGWTGPRCEAPAAAPEVSEEPRCPRAACQAKRGDQRCDRECNSPGCGWDGGDCSLSVGDPWRQCEALQCWRLFNNSRCDPACSSPACLYDNFDCHAGGRERTCNPVYEKYCADHFADGRCDQGCNTEECGWDGLDCASEVPALLARGVLVLTVLLPPEELLRSSADFLQRLSAILRTSLRFRLDAHGQAMVFPYHRPSPGSEPRARRELAPEVIGSVVMLEIDNRLCLQSPENDHCFPDAQSAADYLGALSAVERLDFPYPLRDVRGEPLEPPEPSVPLLPLLVAGAVLLLVILVLGVMVARRKREHSTLWFPEGFSLHKDVASGHKGRREPVGQDALGMKNMAKGESLMGEVATDWMDTECPEAKRLKVEEPGMGAEEAVDCRQWTQHHLVAADIRVAPAMALTPPQGDADADGMDVNVRGPDGFTPLMLASFCGGALEPMPTEEDEADDTSASIISDLICQGAQLGARTDRTGETALHLAARYARADAAKRLLDAGADTNAQDHSGRTPLHTAVTADAQGVFQILIRNRSTDLDARMADGSTALILAARLAVEGMVEELIASHADVNAVDELGKSALHWAAAVNNVEATLALLKNGANKDMQDSKEETPLFLAAREGSYEAAKLLLDHFANREITDHLDRLPRDVAQERLHQDIVRLLDQPSGPRSPPGPHGLGPLLCPPGAFLPGLKAAQSGSKKSRRPPGKAGLGPQGPRGRGKKLTLACPGPLADSSVTLSPVDSLDSPRPFGGPPASPGGFPLEGPYAAATATAVSLAQLGGPGRAGLGRQPPGGCVLSLGLLNPVAVPLDWARLPPPAPPGPSFLLPLAPGPQLLNPGTPVSPQERPPPYLAVPGHGEEYPAAGAHSSPPKARFLRVPSEHPYLTPSPESPEHWASPSPPSLSDWSESTPSPATATGAMATTTGALPAQPLPLSVPSSLAQAQTQLGPQPEVTPKRQVLAXDARQFLDLGGLKRPPSCLLSFSVSSFLLVFFILFSFHQPSCILALQRDRDRSSAQGFSLPLFIMGGGYHPPSQSCEESGTSFFPTSLFPHSFLSPSGLSFPYTLT

SEQ ID NO: 1529 - protein, 219 aa, Homo Sapiens
  misc_feature (212)..(212): Xaa can be any naturally occurring amino acid
MRTLACLLLLGCGYLAHVLAEEAEIPREVIERLARSQIHSIRDLQRLLEIDSVGSEDSLDTSLRAHGVHATKHVPEKRPLPIRRKRSIEEAVPAVCKTRTVIYEIPRSQVDPTSANFLIWPPCVEVKRCTGCCNTSSVKCQPSRVHHRSVKVAKVEYVRKKPKLKEVQVRLEEHLECACATTSLNPDYREEDTGRPRESGKKRKRKRLKPTXSSQPDVR

SEQ ID NO: 1530 - protein, 321 aa, Homo Sapiens
  misc_feature (242)..(242): Xaa can be any naturally occurring amino acid
MNRCWALFLSLCCYLRLVSAEGDPIPEELYEMLSDHSIRSFDDLQRLLHGDPGEEDGAELDLNMTRSHSGGELESLARGRRSLGSLTIAEPAMIAECKTRTEVFEISRRLIDRTNANFLVWPPCVEVQRCSGCCNNRNVQCRPTQVQLRPVQVRKIEIVRKKPIFKKATVTLEDHLACKCETVAAARPVTRSPGGSQEQRAKTPQTRVTIRTVRVRRPPKGKHRKFKHTHDKTALKETLGAXGHRQESVWAGLFNMVFAVLPPWGPWSDNIVSLVRLSRCLIRTANGASPTPPRVRPPFHQRVSSQRPPVLPSSSKKKKKD

SEQ ID NO: 1531 - protein, 1142 aa, Homo Sapiens
  misc_feature (1090)..(1090): Xaa can be any naturally occurring amino acid
MGTSHPAFLVLGCLLTGLSLILCQLSLPSILPNENEKVVQLNSSFSLRCFGESEVSWQYPMSEEESSDVEIRNEENNSGLFVTVLEVSSASAAHTGLYTCYYNHTQTEENELEGRHIYIYVPDPDVAFVPLGMTDYLVIVEDDDSAIIPCRTTDPETPVTLHNSEGVVPASYDSRQGFNGTFTVGPYICEATVKGKKFQTIPFNVYALKATSELDLEMEALKTVYKSGETIVVTCAVFNNEVVDLQWTYPGEVKGKGITMLEEIKVPSIKLVYTLTVPEATVKDSGDYECAARQATREVKEMKKVTISVHEKGFIEIKPTFSQLEAVNLHEVKHFVVEVRAYPPPRISWLKNNLTLIENLTEITTDVEKIQEIRYRSKLKLIRAKEEDSGHYTIVAQNEDAVKSYTFELLTQVPSSILDLVDDHHGSTGGQTVRCTAEGTPLPDIEWMICKDIKKCNNETSWTILANNVSNIITEIHSRDRSTVEGRVTFAKVEETIAVRCLAKNLLGAENRELKLVAPTLRSELTVAAAVLVLLVIVIISLIVLVVIWKQKPRYEIRWRVIESISPDGHEYIYVDPMQLPYDSRWEFPRDGLVLGRVLGSGAFGKVVEGTAYGLSRSQPVMKVAVKMLKPTARSSEKQALMSELKIMTHLGPHLNIVNLLGACTKSGPIYIITEYCFYGDLVNYLHKNRDSFLSHHPEKPKKELDIFGLNPADESTRSYVILSFENNGDYMDMKQADTTQYVPMLERKEVSKYSDIQRSLYDRPASYKKKSMLDSEVKNLLSDDNSEGLTLLDLLSFTYQVARGMEFLASKNCVHRDLAARNVLLAQGKIVKICDFGLARDIMHDSNYVSKGSTFLPVKWMAPESIFDNLYTTLSDVWSYGILLWEIFSLGGTPYPGMMVDSTFYNKIKSGYRMAKPDHATSEVYEIMVKCWNSEPEKRPSFYHLSEIVENLLPGQYKKSYEKIHLDFLKSDHPAVARMRVDSDNAYIGVTYKNEEDKLKDWEGGLDEQRLSADSGYIIPLPDIDPVPEEEDLGKRNRHSSQTSEESAIETGSSSSTFIKREDETIEDIDMMDDIGIDSSDLVEDSFLXLADSRGSFHFWGHLWIPFRKPLYCNAEVERRTWLMFKEKFPAKGLGERSKYE

SEQ ID NO: 1532 - protein, 770 aa, Homo Sapiens
  misc_feature (739)..(739): Xaa can be any naturally occurring amino acid
MQPRWAQGATMWLGVLLTLLLCSSLEGQENSFTINSVDMKSLPDWTVQNGKNLTLQCFADVSTTSHVKPQHQMLFYKDDVLFYNISSMKSTESYFIPEVRIYDSGTYKCTVIVNNKEKTTAEYQLLVEGVPSPRVTLDKKEAIQGGIVRVNCSVPEEKAPIHFTIEKLELNEKMVKLKREKNSRDQNFVILEFPVEEQDRVLSFRCQARIISGIHMQTSESTKSELVTVTESFSTPKFHISPTGMIMEGAQLHIKCTIQVTHLAQEFPEIIIQKDKAIVAHNRHGNKAVYSVMAMVEHSGNYTCKVESSRISKVSSIVVNITELFSKPELESSFTHLDQGERLNLSCSIPGAPPANFTIQKEDTIVSQTQDFTKIASKSDSGTYICTAGIDKVVKKSNTVQIVVCEMLSQPRISYDAQFEVIKGQTIEVRCESISGTLPISYQLLKTSKVLENSTKNSNDPAVFKDNPTEDVEYQCVADNCHSHAKMLSEVLRVKVIAPVDEVQISILSSKVVESGEDIVLQCAVNEGSGPITYKFYREKEGKPFYQMTSNATQAFWTKQKASKEQEGEYYCTAFNRANHASSVPRSKILTVRVILAPWKKGLIAVVIIGVIIALLIIAAKCYFLRKAKAKQMPVEMSRPAVPLLNSNNEKMSDPNMEANSHYGHNDDVRNHAMKPINDNKEPLNSDVQYTEVQVSSAESHKDLGKKDTETVYSEVRKAVPDAVESRYSRTEGSLDGTXTARPDAHPWKDIHVPRRTDNPCISRPLCTYL

SEQ ID NO: 1533 - protein, 113 aa, Homo Sapiens
  misc_feature (102)..(102): Xaa can be any naturally occurring amino acid
MSSAAGFCASRPGLLFLGLLLLPLVVAFASAEAEEDGDLQCLCVKTTSQVRPRHITSLEVIKAGPHCPTAQLIATLKNGRKICLDLQAPLYKKIIKKLLESXLLAAYVCAFAI

SEQ ID NO: 1534 - protein, 203 aa, Homo Sapiens
  misc_feature (171)..(171): Xaa can be any naturally occurring amino acid
MPVMRLFPCFLQLLAGLALPAVPPQQWALSAGNGSSEVEVVPFQEVWGRSYCRALERLVDVVSEYPSEVEHMFSPSCVSLLRCTGCCGDENLHCVPVETANVTMQLLKIRSGDRPSYVELTFSQHVRCECRPLREKMKPERRRPKGRGKRRREKQRPTDCHLCGDAVPRRXPTPWRRETPHPARVFITVTLFSDSCWYLPSIY

SEQ ID NO: 1535 - protein, 958 aa, Homo Sapiens
  misc_feature (934)..(934): Xaa can be any naturally occurring amino acid
MTELKAKGPRAPHVAGGPPSPEVGSPLLCRPAAGPFPGSQTSDTLPEVSAIPISLDGLLFPRPCQGQDPSDEKTQDQQSLSDVEGAYSRAEATRGAGGSSSSPPEKDSGLLDSVLDTLLAPSGPGQSQPSPPACEVTSSWCLFGPELPEDPPAAPATQRVLSPLMSRSGCKVGDSSGTAAAHKVLPRGLSPARQLLLPASESPHWSGAPVKPSPQAAAVEVEEEDGSESEESAGPLLKGKPRALGGAAAGGGAAAVPPGAAAGGVALVPKEDSRFSAPRVALVEQDAPMAPGRSPLATTVMDFIHVPILPLNHALLAARTRQLLEDESYDGGAGAASAFAPPRSSPCASSTPVAVGDFPDCAYPPDAEPKDDAYPLYSDFQPPALKIKEEEEGAEASARSPRSYLVAGANPAAFPDFPLGPPPPLPPRATPSRPGEAAVTAAPASASVSSASSSGSTLECILYKAEGAPPQQGPFAPPPCKAPGASGCLLPRDGLPSTSASAAAAGAAPALYPALGLNGLPQLGYQAAVLKEGLPQVYPPYLNYLRPDSEASQSPQYSFESLPQKICLICGDEASGCHYGVLTCGSCKVFFKRAMEGQHNYLCAGRNDCIVDKIRRKNCPACRLRKCCQAGMVLGGRKFKKFNKVRVVRALDAVALPQPVGVPNESQALSQRFTFSPGQDIQLIPPLINLLMSIEPDVIYAGHDNTKPDTSSSLLTSLNQLGERQLLSVVKWSKSLPGFRNLHIDDQITLIQYSWMSLMVFGLGWRSYKHVSGQMLYFAPDLILNEQRMKESSFYSLCLTMWQIPQEFVKLQVSQEEFLCMKVLLLLNTIPLEGLRSQTQFEEMRSSYIRELIKAIGLRQKGVVSSSQRFYQLTKLLDNLHDLVKQLHLYCLNTFIQSRALSVEFPEMMSEVIAAQLPKILAGMVKPLLFHKKXMSSFSFKELNFVVCLFVLVRIMRS

SEQ ID NO: 1536 - protein, 797 aa, Homo Sapiens
  misc_feature (765)..(765): Xaa can be any naturally occurring amino acid
MLLFVLTCLLAVFPAISTKSPIFGPEEVNSVEGNSVSITCYYPPTSVNRHTRKYWCRQGARGGCITLISSEGYVSSKYAGRANLTNFPENGTFVVNIAQLSQDDSGRYKCGLGINSRGLSFDVSLEVSQGPGLLNDTKVYTVDLGRTVTINCPFKTENAQKRKSLYKQIGLYPVLVIDSSGYVNPNYTGRIRLDIQGTGQLLFSVVINQLRLSDAGQYLCQAGDDSNSNKKNADLQVLKPEPELVYEDLRGSVTFHCALGPEVANVAKFLCRQSSGENCDVVVNTLGKRAPAFEGRILLNPQDKDGSFSVVITGLRKEDAGRYLCGAHSDGQLQEGSPIQAWQLFVNEESTIPRSPTVVKGVAGGSVAVLCPYNRKESKSIKYWCLWEGAQNGRCPLLVDSEGWVKAQYEGRLSLLEEPGNGTFTVILNQLTSRDAGFYWCLTNGDTLWRTTVEIKIIEGEPNLKVPGNVTAVLGETLKVPCHFPCKFSSYEKYWCKWNNTGCQALPSQDEGPSKAFVNCDENSRLVSLTLNLVTRADEGWYWCGVKQGHFYGETAAVYVAVEERKAAGSRDVSLAKADAAPDEKVLDSGFREIENKAIQDPRLFAEEKAVADTRDQADGSRASVDSGSSEEQGGSSRALVSTLVPLGLVLAVGAVAVGVARARHRKNVDRVSIRSYRTDISMSDFENSREFGANDNMGASSITQETSLGGKEEFVATTESTTETKEPKKAKRSSKEEAEMAYKDFLLQSSTVAAEAQDGPQEAXTVSPPAPCTHDNHLQNHVDPGALSSWGPHSLL

SEQ ID NO: 1537 - protein, 1072 aa, Homo Sapiens
  misc_feature (1069)..(1069): Xaa can be any naturally occurring amino acid
MPPRPSSGELWGIHLMPPRILVECLLPNGMIVTLECLREATLITIKHELFKEARKYPLHQLLQDESSYIFVSVTQEAEREEFFDETRRLCDLRLFQPFLKVIEPVGNREEKILNREIGFAIGMPVCEFDMVKDPEVQDFRRNILNVCKEAVDLRDLNSPHSRAMYVYPPNVESSPELPKHIYNKLDKGQIIVVIWVIVSPNNDKQKYTLKINHDCVPEQVIAEAIRKKTRSMLLSSEQLKLCVLEYQGKYILKVCGCDEYFLEKYPLSQYKYIRSCIMLGRMPNLMLMAKESLYSQLPMDCFTMPSYSRRISTATPYMNGETSTKSLWVINSALRIKILCATYVNVNIRDIDKIYVRTGIYHGGEPLCDNVNTQRVPCSNPRWNEWLNYDIYIPDLPRAARLCLSICSVKGRKGAKEEHCPLAWGNINLFDYTDTLVSGKMALNLWPVPHGLEDLLNPIGVTGSNPNKETPCLELEFDWFSSVVKFPDMSVIEEHANWSVSREAGFSYSHAGLSNRLARDNELRENDKEQLKAISTRDPLSEITEQEKDFLWSHRHYCVTIPEILPKLLLSVKWNSRDEVAQMYCLVKDWPPIKPEQAMELLDCNYPDPMVRGFAVRCLEKYLTDDKLSQYLIQLVQVLKYEQYLDNLLVRFLLKKALTNQRIGHFFFWHLKSEMHNKTVSQRFGLLLESYCRACGMYLKHLNRQVEAMEKLINLTDILKQEKKDETQKVQMKFLVEQMRRPDFMDALQGFLSPLNPAHQLGNLRLEECRIMSSAKRPLWLNWENPDIMSELLFQNNEIIFKNGDDLRQDMLTLQIIRIMENIWQNQGLDLRMLPYGCLSIGDCVGLIEVVRNSHTIMQIQCKGGLKGALQFNSHTLHQWLKDKNKGEIYDAAIDLFTRSCAGYCVATFILGIGDRHNSNIMVKDDGQLFHIDFGHFLDHKKKKFGYKRERVPFVLTQDFLIVISKGAQECTKTREFERFQEMCYKAYLAIRQHANLFINLFSMMLGSGMPELQSFDDIAYIRKTLALDKTEQEALEYFMKQMNDAHHGGWTTKMDWIFHTIKQHALNXKDN

SEQ ID NO: 1538 - protein, 830 aa, Homo Sapiens
  misc_feature (729)..(729): Xaa can be any naturally occurring amino acid
MAGPEGFQYRALYPFRRERPEDLELLPGDVLVVSRAALQALGVAEGGERCPQSVGWMPGLNERTRQRGDFPGTYVEFLGPVALARPGPRPRGPRPLPARPRDGAPEPGLTLPDLPEQFSPPDVAPPLLVKLVEAIERTGLDSESHYRPELPAPRTDWSLSDVDQWDTAALADGIKSFLLALPAPLVTPEASAEARRALREAAGPVGPALEPPTLPLHRALTLRFLLQHLGRVARRAPALGPAVRALGATFGPLLLRAPPPPSSPPPGGAPDGSEPSPDFPALLVEKLLQEHLEEQEVAPPALPPKPPKAKPAPTVLANGGSPPSLQDAEWYWGDISREEVNEKLRDTPDGTFLVRDASSKIQGEYTLTLRKGGNNKLIKVFHRDGHYGFSEPLTFCSVVDLINHYRHESLAQYNAKLDTRLLYPVSKYQQDQIVKEDSVEAVGAQLKVYHQQYQDKSREYDQLYEEYTRTSQELQMKRTAIEAFNETIKIFEEQGQTQEKCSKEYLERFRREGNEKEMQRILLNSERLKSRIAEIHESRTKLEQQLRAQASDNREIDKRMNSLKPDLMQLRKIRDQYLVWLTQKGARQKKINEWLGIKNETEDQYALMEDEDDLPHHEERTWYVGKINRTQAEEMLSGKRDGTFLIRESSQRGCYACSVVVDGDTKHCVIYRTATGFGFAEPYNLYGSLKELVLHYQHASLVQHNDALTVTLAHPVRAPGPGPPPAARXAPRTRPKQSRPWARLRRRLRRREPRTRPATSRGPHFSGSGSCLGFSHPLSLSFPPPFSRSPSVSFSLSFLAPVSLHVGGPNSPTPYLRVLRALPSPWLWSP

SEQ ID NO: 1539 - protein, 672 aa, Homo Sapiens
  misc_feature (563)..(563): Xaa can be any naturally occurring amino acid
MDAMKRGLCCVLLLCGAVFVSPSQEIHARFRRGARSYQVICRDEKTQMIYQQHQSWLRPVLRSNRVEYCWCNSGRAQCHSVPVKSCSEPRCFNGGTCQQALYFSDFVCQCPEGFAGKCCEIDTRATCYEDQGISYRGTWSTAESGAECTNWNSSALAQKPYSGRRPDAIRLGLGNHNYCRNPDRDSKPWCYVFKAGKYSSEFCSTPACSEGNSDCYFGNGSAYRGTHSLTESGASCLPWNSMILIGKVYTAQNPSAQALGLGKHNYCRNPDGDAKPWCHVLKNRRLTWEYCDVPSCSTCGLRQYSQPQFRIKGGLFADIASHPWQAAIFAKHRRSPGERFLCGGILISSCWILSAAHCFQERFPPHHLTVILGRTYRVVPGEEEQKFEVEKYIVHKEFDDDTYDNDIALLQLKSDSSRCAQESSVVRTVCLPPADLQLPDWTECELSGYGKHEALSPFYSERLKEAHVRLYPSSRCTSQHLLNRTVTDNMLCAGDTRSGGPQANLHDACQGDSGGPLVCLNDGRMTLVGIISWGLGCGQKDVPGVYTKVTNYLDWIRDNMRPXPGTPDSSKANEIPPLLLQKTLQRRSASLQTSPDPPHRRSGTRPYRRGKSAFSQILPILEVFRTWSDFRILCQMGRHECTLASPGMPPPWAESGHATLFSAKAQPPDLSP

SEQ ID NO: 1540 - protein, 626 aa, Homo Sapiens
  misc_feature (517)..(517): Xaa can be any naturally occurring amino acid
MDAMKRGLCCVLLLCGAVFVSPSQEIHARFRRGARSYQGCSEPRCFNGGTCQQALYFSDFVCQCPEGFAGKCCEIDTRATCYEDQGISYRGTWSTAESGAECTNWNSSALAQKPYSGRRPDAIRLGLGNHNYCRNPDRDSKPWCYVFKAGKYSSEFCSTPACSEGNSDCYFGNGSAYRGTHSLTESGASCLPWNSMILIGKVYTAQNPSAQALGLGKHNYCRNPDGDAKPWCHVLKNRRLTWEYCDVPSCSTCGLRQYSQPQFRIKGGLFADIASHPWQAAIFAKHRRSPGERFLCGGILISSCWILSAAHCFQERFPPHHLTVILGRTYRVVPGEEEQKFEVEKYIVHKEFDDDTYDNDIALLQLKSDSSRCAQESSVVRTVCLPPADLQLPDWTECELSGYGKHEALSPFYSERLKEAHVRLYPSSRCTSQHLLNRTVTDNMLCAGDTRSGGPQANLHDACQGDSGGPLVCLNDGRMTLVGIISWGLGCGQKDVPGVYTKVTNYLDWIRDNMRPXPGTPDSSKANEIPPLLLQKTLQRRSASLQTSPDPPHRRSGTRPYRRGKSAFSQILPILEVFRTWSDFRILCQMGRHECTLASPGMPPPWAESGHATLFSAKAQPPDLSP

SEQ ID NO: 1541 - protein, 482 aa, Homo Sapiens
  misc_feature (432)..(432): Xaa can be any naturally occurring amino acid
MRALLARLLLCVLVVSDSKGSNELHQVPSNCDCLNGGTCVSNKYFSNIHWCNCPKKFGGQHCEIDKSKTCYEGNGHFYRGKASTDTMGRPCLPWNSATVLQQTYHAHRSDALQLGLGKHNYCRNPDNRRRPWCYVQVGLKPLVQECMVHDCADGKKPSSPPEELKFQCGQKTLRPRFKIIGGEFTTIENQPWFAAIYRRHRGGSVTYVCGGSLISPCWVISATHCFIDYPKKEDYIVYLGRSRLNSNTQGEMKFEVENLILHKDYSADTLAHHNDIALLKIRSKEGRCAQPSRTIQTICLPSMYNDPQFGTSCEITGFGKENSTDYLYPEQLKMTVVKLISHRECQQPHYYGSEVTTKMLCAADPQWKTDSCQGDSGGPLVCSLQGRMTLTGIVSWGRGCALKDKPGVYTRVSHFLPWIRSHTKEENGLALXGSPGRKRAPPAFLLVVIFAVESSPSAVRRDWEDRLCTDGFACATHQGERQ

SEQ ID NO: 1542 - protein, 327 aa, Homo Sapiens
  misc_feature (282)..(282): Xaa can be any naturally occurring amino acid
MGHPPLLPLLLLLHTCVPASWGLRCMQCKTNGDCRVEECALGQDLCRTTIVRLWEEGEELELVEKSCTHSEKTNRTLSYRTGLKITSLTEVVCGLDLCNQGNSGRAVTYSRSRYLECISCGSSDMSCERGRHQSLQCRSPEEQCLDVVTHWIQEGEEGRPKDDRHLRGCGYLPGCPGSNGFHNNDTFHFLKCCNTTKCNEGPILELENLPQNGRQCYSCKGNSTHGCSSEETFLIDCRGPMNQCLVATGTHERSLWGSWLPCKSTTALRPPCCEEAQATHVXMPCGDRAPDVSAISAQAPDKWVKKPPWTCSPSRCDIEKKQETWLY

SEQ ID NO: 1543 - protein, 831 aa, Homo Sapiens
  misc_feature (811)..(811): Xaa can be any naturally occurring amino acid
MEHKEVVLLLLLFLKSGQGEPLDDYVNTQGASLFSVTKKQLGAGSIEECAAKCEEDEEFTCRAFQYHSKEQQCVIMAENRKSSIIIRMRDVVLFEKKVYLSECKTGNGKNYRGTMSKTKNGITCQKWSSTSPHRPRFSPATHPSEGLEENYCRNPDNDPQGPWCYTTDPEKRYDYCDILECEEECMHCSGENYDGKISKTMSGLECQAWDSQSPHAHGYIPSKFPNKNLKKNYCRNPDRELRPWCFTTDPNKRWELCDIPRCTTPPPSSGPTYQCLKGTGENYRGNVAVTVSGHTCQHWSAQTPHTHNRTPENFPCKNLDENYCRNPDGKRAPWCHTTNSQVRWEYCKIPSCDSSPVSTEQLAPTAPPELTPVVQDCYHGDGQSYRGTSSTTTTGKKCQSWSSMTPHRHQKTPENYPNAGLTMNYCRNPDADKGPWCFTTDPSVRWEYCNLKKCSGTEASVVAPPPVVLLPDVETPSEEDCMFGNGKGYRGKRATTVTGTPCQDWAAQEPHRHSIFTPETNPRAGLEKNYCRNPDGDVGGPWCYTTNPRKLYDYCDVPQCAAPSFDCGKPQVEPKKCPGRVVGGCVAHPHSWPWQVSLRTRFGMHFCGGTLISPEWVLTAAHCLEKSPRPSSYKVILGAHQEVNLEPHVQEIEVSRLFLEPTRKDIALLKLSSPAVITDKVIPACLPSPNYVVADRTECFITGWGETQGTFGAGLLKEAQLPVIENKVCNRYEFLNGRVQSTELCAGHLAGGTDSCQGDSGGPLVCFEKDKYILQGVTSWGLGCARPNKPGVYVRVSRFVTWIEGVMRNNXLDGRQSDALTHLEAGTWVGI

SEQ ID NO: 1544 - protein, 315 aa, Homo Sapiens
  misc_feature (268)..(268): Xaa can be any naturally occurring amino acid
MPRSCCSRSGALLLALLLQASMEVRGWCLESSQCQDLTTESNLLECIRACKPDLSAETPMFPGNGDEQPLTENPRKYVMGHFRWDRFGRRNSSSSGSSGAGQKREDVSAGEDCGPLPEGGPEPRSDGAKPGPREGKRSYSMEHFRWGKPVGKKRRPVKVYPNGAEDESAEAFPLEFKRELTGQRLREGDGPDGPADDGAGAQADLEHSLLVAAEKKDEGPYRMEHFRWGSPPKDKRYGGFMTSEKSQTPLVTLFKNAIIKNAYKKGEXGHSGAPGLPSPRRSTPKPLALPCPAAASQPGGSWQIISLLKLPVVRK

SEQ ID NO: 1545 - protein, 366 aa, Homo Sapiens
  misc_feature (356)..(356): Xaa can be any naturally occurring amino acid
MAKLIALTLLGMGLALFRNHQSSYQTRLNALREVQPVELPNCNLVKGIETGSEDLEILPNGLAFISSGLKYPGIKSFNPNSPGKILLMDLNEEDPTVLELGITGSKFDVSSFNPHGISTFTDEDNAMYLLVVNHPDAKSTVELFKFQEEEKSLLHLKTIRHKLLPNLNDIVAVGPEHFYGTNDHYFLDPYLQSWEMYLGLAWSYVVYYSPSEVRVVAEGFDFANGINISPDGKYVYIAELLAHKIHVYEKHANWTLTPLKSLDFNTLVDNISVDPETGDLWVGCHPNGMKIFFYDSENPPASEVLRIQNILTEEPKVTQVYAENGTVLQGSTVASVYKGKLLIGTVFHKALYCELXQTDLHPCHRN

SEQ ID NO: 1546 - protein, 236 aa, Homo Sapiens
  misc_feature (228)..(228): Xaa can be any naturally occurring amino acid
MNIKGSPWKGSLLLLLVSNLLLCQSVAPLPICPGGAARCQVTLRDLFDRAVVLSHYIHNLSSEMFSEFDKRYTHGRGFITKAINSCHTSSLATPEDKEQAQQMNQKDFLSLIVSILRSWNEPLYHLVTEVRGMQEAPEAILSKAVEIEEQTKRLLEGMELIVSQVHPETKENEIYPVWSGLPSLQMADEESRLSAYYNLLHCLRRDSHKIDNYLKLLKCRIIHNNNCXAHIHFIYF

SEQ ID NO: 1547 - protein, 478 aa, Homo Sapiens
  misc_feature (462)..(462): Xaa can be any naturally occurring amino acid
MWQLTSLLLFVATWGISGTPAPLDSVFSSSERAHQVLRIRKRANSFLEELRHSSLERECIEEICDFEEAKEIFQNVDDTLAFWSKHVDGDQCLVLPLEHPCASLCCGHGTCIDGIGSFSCDCRSGWEGRFCQREVSFLNCSLDNGGCTHYCLEEVGWRRCSCAPGYKLGDDLLQCHPAVKFPCGRPWKRMEKKRSHLKRDTEDQEDQVDPRLIDGKMTRRGDSPWQVVLLDSKKKLACGAVLIHPSWVLTAAHCMDESKKLLVRLGEYDLRRWEKWELDLDIKEVFVHPNYSKSTTDNDIALLHLAQPATLSQTIVPICLPDSGLAERELNQAGQETLVTGWGYHSSREKEAKRNRTFVLNFIKIPVVPHNECSEVMSNMVSENMLCAGILGDRQDACEGDSGGPMVASFHGTWFLVGLVSWGEGCGLLHNYGVYTKVSRYLDWIHGHIRDKEAPQKSWAPXRPSLQGWAFAWQWMGH

SEQ ID NO: 1548 - protein, 388 aa, Homo Sapiens
  misc_feature (378)..(378): Xaa can be any naturally occurring amino acid
MVLESTMVCVDNSEYMRNGDFLPTRLQAQQDAVNIVCHSKTRSNPENNVGLITLANDCEVLTTLTPDTGRILSKLHTVQPKGKITFCTGIRVAHLALKHRQGKNHKMRIIAFVGSPVEDNEKDLVKLAKRLKKEKVNVDIINFGEEEVNTEKLTAFVNTLNGKDGTGSHLVTVPPGPSLADALISSPILAGEGGAMLGLGASDFEFGVDPSADPELALALRVSMEEQRQRQEEEARRAAAASAAEAGIATTGTEDSDDALLKMTISQQEFGRTGLPDLSSMTEEEQIAYAMQMSLQGAEFGQAESADIDASSAMDTSEPAKEEDDYDVMQDPEFLQSVLENLPGVDPNNEAIRNAMGSLASQATKDGKKDKKEEDKKXDWRERVAESA

SEQ ID NO: 1549 - protein, 218 aa, Homo Sapiens
  misc_feature (176)..(176): Xaa can be any naturally occurring amino acid
MQRRLVQQWSVAVFLLSYAVPSCGRSVEGLSRRLKRAVSEHQLLHDKGKSIQDLRRRFFLHHLIAEIHTAEIRATSEVSPNSKPSPNTKNHPVRFGSDDEGRYLTQETNKVETYKEQPLKTPGKKKKGKPGKRKEQEKKKRRTRSAWLDSGVTGSGLEGDHLSDTSTTSLELDSRXQASLARSLSGVLSAGFWSLPSALAWTNLEFSPFMYLYRLCSN

SEQ ID NO: 1550 - protein, 230 aa, Homo Sapiens
  misc_feature (178)..(178): Xaa can be any naturally occurring amino acid
MQRRLVQQWSVAVFLLSYAVPSCGRSVEGLSRRLKRAVSEHQLLHDKGKSIQDLRRRFFLHHLIAEIHTAEIRATSEVSPNSKPSPNTKNHPVRFGSDDEGRYLTQETNKVETYKEQPLKTPGKKKKGKPGKRKEQEKKKRRTRSAWLDSGVTGSGLEGDHLSDTSTTSLELDSRRHXNFQQRPSKDILQDSVIVNIWKVLEIFIVCKYCKCIGIKLSPPLLYETAHWSL

SEQ ID NO: 1551 - protein, 272 aa, Homo Sapiens
  misc_feature (217)..(217): Xaa can be any naturally occurring amino acid
MGVLRVGLCPGLTEEMIQLLRSHRIKTVVDLVSADLEEVAQKCGLSYKAEALRRIQVVHAFDIFQMLDVLQELRGTVAQQVTGSSGTVKVVVVDSVTAVVSPLLGGQQREGLALMMQLARELKTLARDLGMAVVVTNHITRDRDSGRLKPALGRSWSFVPSTRILLDTIEGAGASGGRRMACLAKSSRQPTGFQEMVDIGTWGTSEQSATLQGDQTXPVLLFGKQGSIGDPSQLFFPVTPAVYCHLALVTTDVLRLARRDILGSLASLSVSI

SEQ ID NO: 1552 - protein, 1078 aa, Homo Sapiens
  misc_feature (1048)..(1048): Xaa can be any naturally occurring amino acid
MMAAEAGSEEGGPVTAGAGGGGAAAGSSAYPAVCRVKIPAALPVAAAPYPGLVETGVAGTLGGGAALGSEFLGAGSVAGALGGAGLTGGGTAAGVAGAAAGVAGAAVAGPSGDMALTKLPTSLLAETLGPGGGFPPLPPPPYLPPLGAGLGTVDEGDSLDGPEYEEEEVAIPLTAPPTNQWYHGKLDRTIAEERLRQAGKSGSYLIRESDRRPGSFVLSFLSQMNVVNHFRIIAMCGDYYIGGRRFSSLSDLIGYYSHVSCLLKGEKLLYPVAPPEPVEDRRRVRAILPYTKVPDTDEISFLKGDMFIVHNELEDGWMWVTNLRTDEQGLIVEDLVEEVGREEDPHEGKIWFHGKISKQEAYNLLMTVGQVCSFLVRPSDNTPGDYSLYFRTNENIQRFKICPTPNNQFMMGGRYYNSIGDIIDHYRKEQIVEGYYLKEPVPMQDQEQVLNDTVDGKEIYNTIRRKTKDAFYKNIVKKGYLLKKGKGKRWKNLYFILEGSDAQLIYFESEKRATKPKGLIDLSVCSVYVVHDSLFGRPNCFQIVVQHFSEEHYIFYFAGETPEQAEDWMKGLQAFCNLRKSSPGTSNKRLRQVSSLVLHIEEAHKLPVKHFTNPYCNIYLNSVQVAKTHAREGQNPVWSEEFVFDDLPPDINRFEITLSNKTKKSKDPDILFMRCQLSRLQKGHATDEWFLLSSHIPLKGIEPGSLRVRARYSMEKIMPEEEYSEFKELILQKELHVVYALSHVCGQDRTLLASILLRIFLHEKLESLLLCTLNDREISMEDEATTLFRATTLASTLMEQYMKATATQFVHHALKDSILKIMESKQSCELSPSKLEKNEDVNTNLTHLLNILSELVEKIFMASEILPPTLRYIYGCLQKSVQHKWPTNTTMRTRVVSGFVFLRLICPAILNPRMFNIISDSPSPIAARTLILVAKSVQNLANLVEFGAKEPYMEGVNPFIKSNKHRMIMFLDELGNVPELPDTTEHSRTDLSRDLAALHEICVAHSDELRTLSNERGAQQHVLKKLLAITELLQQKQNQYTKTNDVRXQPSPQCSAWIQHVQHGNSLQFNVSFALAKK

SEQ ID NO: 1553 - protein, 949 aa, Homo Sapiens
  misc_feature (929)..(929): Xaa can be any naturally occurring amino acid
MPPKTPRKTAATAAAAAAEPPAPPPPPPPEEDPEQDSGPEDLPLVRLEFEETEEPDFTALCQKLKIPDHVRERAWLTWEKVSSVDGVLGGYIQKKKELWGICIFIAAVDLDEMSFTFTELQKNIEISVHKFFNLLKEIDTSTKVDNAMSRLLKKYDVLFALFSKLERTCELIYLTQPSSSISTEINSALVLKVSWITFLLAKGEVLQMEDDLVISFQLMLCVLDYFIKLSPPMLLKEPYKTAVIPINGSPRTPRRGQNRSARIAKQLENDTRIIEVLCKEHECNIDEVKNVYFKNFIPFMNSLGLVTSNGLPEVENLSKRYEEIYLKNKDLDARLFLDHDKTLQTDSIDSFETQRTPRKSNLDEEVNVIPPHTPVRTVMNTIQQLMMILNSASDQPSENLISYFNNCTVNPKESILKRVKDIGYIFKEKFAKAVGQGCVEIGSQRYKLGVRLYYRVMESMLKSEEERLSIQNFSKLLNDNIFHMSLLACALEVVMATYSRSTSQNLDSGTDLSFPWILNVLNLKAFDFYKVIESFIKAEGNLTREMIKHLERCEHRIMESLAWLSDSPLFDLIKQSKDREGPTDHLESACPLNLPLQNNHTAADMYLSPVRSPKKKGSTTRVNSTANAETQATSAFQTQKPLKSTSLSLFYKKVYRLAYLRLNTLCERLLSEHPELEHIIWTLFQHTLQNEYELMRDRHLDQIMMCSMYGICKVKNIDLKFKIIVTAYKDLPHAVQETFKRVLIKEEEYDSIIVFYNSVFMQRLKTNILQYASTRPPTLSPIPHIPRSPYKFPSSPLRIPGGNIYISPLKSPYKISEGLPTPTKMTPRSRILVSIGESFGTSEKFQKINQMVCNSDRVLKRSAEGSNPPKPLKKLRFDIEGSDEADGSKHLPGESKFQQKLAEMTSTRTRMQKQKMNDSMDTSNKEEKXGSQDLGGHCVHLWIHCLSQM

SEQ ID NO: 1554 - protein, 210 aa, Homo Sapiens
  misc_feature (202)..(202): Xaa can be any naturally occurring amino acid
MKWVWALLLLAALGSGRAERDCRVSSFRVKENFDKARFSGTWYAMAKKDPEGLFLQDNIVAEFSVDETGQMSATAKGRVRLLNNWDVCADMVGTFTDTEDPAKFKMKYWGVASFLQKGNDDHWIVDTDYDTYAVQYSCRLLNLDGTCADSYSFVFSRDPNGLPPEAQKIVRQRQEELCLARQYRLIVHNGYCDGRSERNLLXQYQESSFI

SEQ ID NO: 1555 - protein, 114 aa, Homo Sapiens
  misc_feature (98)..(98): Xaa can be any naturally occurring amino acid
MCSSLEQALAVLVTTFHKYSCQEGDKFKLSKGEMKELLHKELPSFVGEKVDEEGLKKLMGSLDENSDQQVDFQEYAVFLALITVMCNDFFQGCPDRPXSRTLDFLPWISWAQDC

SEQ ID NO: 1556 - protein, 138 aa, Homo Sapiens
  misc_feature (115)..(115): Xaa can be any naturally occurring amino acid
MTCKMSQLERNIETIINTFHQYSVKLGHPDTLNQGEFKELVRKDLQNFLKKENKNEKVIEHIMEDLDTNADKQLSFEEFIMLMARLTWASHEKMHEGDEGPGHHHKPGLGEGTPXDHSGQDHSGHGHGHSHGGHGHSH

SEQ ID NO: 1557 - protein, 135 aa, Homo Sapiens
  misc_feature (123)..(123): Xaa can be any naturally occurring amino acid
MKLLTGLVFCSLVLGVSSRSFFSFLGEAFDGARDMWRAYSDMREANYIGSDKYFHARGNYDAAKRGPGGAWAAEVISDARENIQRFFGHGAEDSLADQAANEWGRSGKDPNHFRPAGLPEKYXASSSLCSQEIWL

SEQ ID NO: 1558 - protein, 135 aa, Homo Sapiens
  misc_feature (123)..(123): Xaa can be any naturally occurring amino acid
MKLLTGLVFCSLVLSVSSRSFFSFLGEAFDGARDMWRAYSDMREANYIGSDKYFHARGNYDAAKRGPGGAWAAEVISNARENIQRLTGHGAEDSLADQAANKWGRSGRDPNHFRPAGLPEKYXASSSLCSQETWL

SEQ ID NO: 1559 - protein, 117 aa, Homo Sapiens
  misc_feature (96)..(96): Xaa can be any naturally occurring amino acid
MKLLMVLMLAALLLHCYADSGCKLLEDMVEKTINSDISIPEYKELLQEFIDSDAAAEAMGKFKQCFLNQSHRTLKNFGLMMHTVYDSIWCNMKSNXLYPRRLAQRATDYGQNSSVDC

SEQ ID NO: 1560 - protein, 134 aa, Homo Sapiens
  misc_feature (94)..(94): Xaa can be any naturally occurring amino acid
MKLLMVLMLAALSQHCYAGSGCPLLENVISKTINPQVSKTEYKELLQEFIDDNATTNAIDELKECFLNQTDETLSNVEVFMQLIYDSSLCDLFXLSARPLAHRTAGYGEKPTTDCCKPHLLFLMSFYYKLQDNC

SEQ ID NO: 1561 - protein, 623 aa, Homo Sapiens
  misc_feature (611)..(611): Xaa can be any naturally occurring amino acid
MIASQFLSALTLVLLIKESGAWSYNTSTEAMTYDEASAYCQQRYTHLVAIQNKEEIEYLNSILSYSPSYYWIGIRKVNNVWVWVGTQKPLTEEAKNWAPGEPNNRQKDEDCVEIYIKREKDVGMWNDERCSKKKLALCYTAACTNTSCSGHGECVETINNYTCKCDPGFSGLKCEQIVNCTALESPEHGSLVCSHPLGNFSYNSSCSISCDRGYLPSSMETMQCMSSGEWSAPIPACNVVECDAVTNPANGFVECFQNPGSFPWNTTCTFDCEEGFELMGAQSLQCTSSGNWDNEKPTCKAVTCRAVRQPQNGSVRCSHSPAGEFTFKSSCNFTCEEGFMLQGPAQVECTTQGQWTQQIPVCEAFQCTALSNPERGYMNCLPSASGSFRYGSSCEFSCEQGFVLKGSKRLQCGPTGEWDNEKPTCEAVRCDAVHQPPKGLVRCAHSPIGEFTYKSSCAFSCEEGFELYGSTQLECTSQGQWTEEVPSCQVVKCSSLAVPGKINMSCSGEPVFGTVCKFACPEGWTLNGSAARTCGATGHWSGLLPTCEAPTESNIPLVAGLSAAGLSLLTLAPFLLWLRKCLRKAKKFVPASSCQSLESDGSYQKPSYILXVQKNQKQVHLGN

SEQ ID NO: 1562 - protein, 384 aa, Homo Sapiens
  misc_feature (373)..(373): Xaa can be any naturally occurring amino acid
MIFPWKCQSTQRDLWNIFKLWGWTMLCCDFLAHHGTDCWTYHYSEKPMNWQRARRFCRDNYTDLVAIQNKAEIEYLEKTLPFSRSYYWIGIRKIGGIWTWVGTNKSLTEEAENWGDGEPNNKKNKEDCVEIYIKRNKDAGKWNDDACHKLKAALCYTASCQPWSCSGHGECVEIINNYTCNCDVGYYGPQCQFVIQCEPLEAPELGTMDCTHPLGNFSFSSQCAFSCSEGTNLTGIEETTCGPFGNWSSPEPTCQVIQCEPLSAPDLGIMNCSHPLASFSFTSACTFICSEGTELIGKKKTICESSGIWSNPSPICQKLDKSFSMIKEGDYNPLFIPVAVMVTAFSGLAFIIWLARRLKKGKKSKRSMNDPYXIALGERKFLEY

SEQ ID NO: 1563 - protein, 837 aa, Homo Sapiens
  misc_feature (831)..(831): Xaa can be any naturally occurring amino acid
MANCQIAILYQRFQRVVFGISQLLCFSALISELTNQKEVAAWTYHYSTKAYSWNISRKYCQNRYTDLVAIQNKNEIDYLNKVLPYYSSYYWIGIRKNNKTWTWVGTKKALTNEAENWADNEPNNKRNNEDCVEIYIKSPSAPGKWNDEHCLKKKHALCYTASCQDMSCSKQGECLETIGNYTCSCYPGFYGPECEYVRECGELELPQHVLMNCSHPLGNFSFNSQCSFHCTDGYQVNGPSKLECLASGIWTNKPPQCLAAQCPPLKIPERGNMTCLHSAKAFQHQSSCSFSCEEGFALVGPEVVQCTASGVWTAPAPVCKAVQCQHLEAPSEGTMDCVHPLTAFAYGSSCKFECQPGYRVRGLDMLRCIDSGHWSAPLPTCEAISCEPLESPVHGSMDCSPSLRAFQYDTNCSFRCAEGFMLRGADIVRCDNLGQWTAPAPVCQALQCQDLPVPNEARVNCSHPFGAFRYQSVCSFTCNEGLLLVGASVLQCLATGNWNSVPPECQAIPCTPLLSPQNGTMTCVQPLGSSSYKSTCQFICDEGYSLSGPERLDCTRSGRWTDSPPMCEAIKCPELFAPEQGSLDCSDTRGEFNVGSTCHFSCDNGFKLEGPNNVECTTSGRWSATPPTCKGIASLPTPGVQCPALTTPGQGTMYCRHHPGTFGFNTTCYFGCNAGFTLIGDSTLSCRPSGQWTAVTPACRAVKCSELHVNKPIAMNCSNLWGNFSYGSICSFHCLEGQLLNGSAQTACQENGHWSTTVPTCQAGPLTIQEALTYFGGAVASTIGLIMGGTLLALLRKRFRQKDDGKCPLNPHSHLGTYGVFTNAAFDPSPXGFHKHP

SEQ ID NO: 1564 - protein, 436 aa, Homo Sapiens
  misc_feature (419)..(419): Xaa can be any naturally occurring amino acid
MPSSVSWGILLLAGLCCLVPVSLAEDPQGDAAQKTDTSHHDQDHPTFNKITPNLAEFAFSLYRQLAHQSNSTNIFFSPVSIATAFAMLSLGTKADTHDEILEGLNFNLTEIPEAQIHEGFQELLRTLNQPDSQLQLTTGNGLFLSEGLKLVDKFLEDVKKLYHSEAFTVNFGDTEEAKKQINDYVEKGTQGKIVDLVKELDRDTVFALVNYIFFKGKWERPFEVKDTEEEDFHVDQVTTVKVPMMKRLGMFNIQHCKKLSSWVLLMKYLGNATAIFFLPDEGKLQHLENELTHDIITKFLENEDRRSASLHLPKLSITGTYDLKSVLGQLGITKVFSNGADLSGVTEEAPLKLSKAVHKAVLTIDEKGTEAAGAMFLEAIPMSIPPEVKFNKPFVFLMIEQNTKSPLFMGKVVNPTQKXLPLAPQPLPSIPGPLPG

SEQ ID NO: 1565 - protein, 495 aa, Homo Sapiens
  misc_feature (424)..(424): Xaa can be any naturally occurring amino acid
MERMLPLLALGLLAAGFCPAVLCHPNSPLDEENLTQENQDRGTHVDLGLASANVDFAFSLYKQLVLKAPDKNVIFSPLSISTALAFLSLGAHNTTLTEILKGLKFNLTETSEAEIHQSFQHLLRTLNQSSDELQLSMGNAMFVKEQLSLLDRFTEDAKRLYGSEAFATDFQDSAAAKKLINDYVKNGTRGKITDLIKDLDSQTMMVLVNYIFFKAKWEMPFDPQDTHQSRFYLSKKKWVMVPMMSLHHLTIPYFRDEELSCTVVELKYTGNASALFILPDQDKMEEVEAMLLPETLKRWRDSLEFREIGELYLPKFSISRDYNLNDILLQLGIEEAFTSKADLSGITGARNLAVSQVVHKAVLDVFEEGTEASAATAVKITLLSALVETRTIVRFNRPFLMIIVPTDTQNIFFMSKVTNPKQAXSLPSSSGALSKELGMQAGCLGLWAQPGPCAPSGHGMCGPVCLSLEGDSDSLCSSHMHRGPWTLQSGGSWAS

SEQ ID NO: 1566 - protein, 421 aa, Homo Sapiens
  misc_feature (407)..(407): Xaa can be any naturally occurring amino acid
MQLFLLLCLVLLSPQGASLHRHHPREMKKRVEDLHVGATVAPSSRRDFTFDLYRALASAAPSQNIFFSPVSISMSLAMLSLGAGSSTKMQILEGLGLNLQKSSEKELHRGFQQLLQELNQPRDGFQLSLGNALFTDLVVDLQDTFVSAMKTLYLADTFPTNFRDSAGAMKQINDYVAKQTKGKIVDLLKNLDSNAVVIMVNYIFFKAKWETSFNHKGTQEQDFYVTSETVVRVPMMSREDQYHYLLDRNLSCRVVGVPYQGNATALFILPSEGKMQQVENGLSEKTLRKWLKMFKKRQLELYLPKFSIEGSYQLEKVLPSLGISNVFTSHADLSGISNHSNIQVSEMVHKAVVEVDESGTRAAAATGTIFTFRSARLNSQRLVFNRPFLMFIVDNNILFLGKVNRPXGGASPEIYRPQGGR

SEQ ID NO: 1567 - protein, 493 aa, Homo Sapiens
  misc_feature (391)..(391): Xaa can be any naturally occurring amino acid
MNSLSEANTKFMFDLFQQFRKSKENNIFYSPISITSALGMVLLGAKDNTAQQIKKVLHFDQVTENTTGKAATYHVDRSGNVHHQFQKLLTEFNKSTDAYELKIANKLFGEKTYLFLQEYLDAIKKFYQTSVESVDFANAPEESRKKINSWVESQTNEKIKNLIPEGNIGSNTTLVLVNAIYFKGQWEKKFNKEDTKEEKFWPNKNTYKSIQMMRQYTSFHFASLEDVQAKVLEIPYKGKDLSMIVLLPNEIDGLQKLEEKLTAEKLMEWTSLQNMRETRVDLHLPRFKVEESYDLKDTLRTMGMVDIFNGDADLSGMTGSRGLVLSGVLHKAFVEVTEEGAEAAAATAVVGFGSSPTSTNEEFHCNHPFLFFIRQNKTNSILFYGRFSSPXMQLVCHSIWKMFTCRCSGKLIAGNNRFSWLIFLFFLILMMIVIIKNLMIKIACLSLFLLISPHINVLFLPEKFSLRKNVQNKMNHLIPYLLNLKYNSVCDLF

SEQ ID NO: 1568 - protein, 435 aa, Homo Sapiens
  misc_feature (403)..(403): Xaa can be any naturally occurring amino acid
MQMSPALTCLVLGLALVFGEGSAVHHPPSYVAHLASDFGVRVFQQVAQASKDRNVVFSPYGVASVLAMLQLTTGGETQQQIQAAMGFKIDDKGMAPALRHLYKELMGPWNKDEISTTDAIFVQRDLKLVQGFMPHFFRLFRSTVKQVDFSEVERARFIINDWVKTHTKGMISNLLGKGAVDQLTRLVLVNALYFNGQWKTPFPDSSTHRRLFHKSDGSTVSVPMMAQTNKFNYTEFTTPDGHYYDILELPYHGDTLSMFIAAPYEKEVPLSALTNILSAQLISHWKGNMTRLPRLLVLPKFSLETEVDLRKPLENLGMTDMFRQFQADFTSLSDQEPLHVAQALQKVKIEVNESGTVASSSTAVIVSARMAPEEIIMDRPFLFVVRHNPTGTVLFMGQVMEPXPWGKTPSSGTKLEMHRERRNSEEKNFSVNDSF

SEQ ID NO: 1569 - protein, 160 aa, Homo Sapiens
  misc_feature (155)..(155): Xaa can be any naturally occurring amino acid
MATKAVCVLKGDGPVQGIINFEQKESNGPVKVWGSIKGLTEGLHGFHVHEFGDNTAGCTSAGPHFNPLSRKHGGPKDEERHVGDLGNVTADKDGVADVSIEDSVISLSGDHCIIGRTLVVHEKADDLGKGGNEESTKTGNAGSRLACGVIGIAQXTFPWM

SEQ ID NO: 1570 - protein, 315 aa, Homo Sapiens
  misc_feature (304)..(304): Xaa can be any naturally occurring amino acid
MRAWIFFLLCLAGRALAAPQQEALPDETEVVEETVAEVTEVSVGANPVQVEVGEFDDGAEETEEEVVAENPCQNHHCKHGKVCELDENNTPMCVCQDPTSCPAPIGEFEKVCSNDNKTFDSSCHFFATKCTLEGTKKGHKLHLDYIGPCKYIPPCLDSELTEFPLRMRDWLKNVLVTLYERDEDNNLLTEKQKLRVKKIHENEKRLEAGDHPVELLARDFEKNYNMYIFPVHWQFGQLDQHPIDGYLSHTELAPLRAPLIPMEHCTTRFFETCDLDNDKYIALDEWAGCFGIKQKDIDKDLVIXIHSFHSTGFSL

SEQ ID NO: 1571 - protein, 680 aa, Homo Sapiens
  misc_feature (665)..(665): Xaa can be any naturally occurring amino acid
MKTGPFFLCLLGTAAAIPTNARLLSDHSKPTAETVAPDNTAIPSLWAEAEENEKETAVSTEDDSHHKAEKSSVLKSKEESHEQSAEQGKSSSQELGLKDQEDSDGHLSVNLEYAPTEGTLDIKEDMIEPQEKKLSENTDFLAPGVSSFTDSNQQESITKREENQEQPRNYSHHQLNRSSKHSQGLRDQGNQEQDPNISNGEEEEEKEPGEVGTHNDNQERKTELPREHANSKQEEDNTQSDDILEESDQPTQVSKMQEDEFDQGNQEQEDNSNAEMEEENASNVNKHIQETEWQSQEGKTGLEAISNHKETEEKTVSEALLMEPTDDGNTTPRNHGVDDDGDDDGDDGGTDGPRHSASDDYFIPSQAFLEAERAQSIAYHLKIEEQREKVHENENIGTTEPGEHQEAKKAENSSNEEETSSEGNMRVHAVDSCMSFQCKRGHICKADQQGKPHCVCQDPVTCPPTKPLDQVCGTDNQTYASSCHLFATKCRLEGTKKGHQLQLDYFGACKSIPTCTDFEVIQFPLRMRDWLKNILMQLYEANSEHAGYLNEKQRNKVKKIYLDEKRLLAGDHPIDLLLRDFKKNYHMYVYPVHWQFSELDQHPMDRVLTHSELAPLRASLVPMEHCITRFFEECDPNKDKHITLKEWGHCFGIKEEDIDENLLFXTKILKNSTFQHPPLF

SEQ ID NO: 1572 - protein, 97 aa, Homo Sapiens
  misc_feature (90)..(90): Xaa can be any naturally occurring amino acid
MSSQQQKQPCTPPPQLQQQQVKQPCQPPPQEPCIPKTKEPCHPKVPEPCHPKVPEPCQPKVPEPCHPKVPEPCPSIVTPAPAQQKTKQKXCGPQPCP

SEQ ID NO: 1573 - protein, 747 aa, Homo Sapiens
  misc_feature (699)..(699): Xaa can be any naturally occurring amino acid
MRLAVGALLVCAVLGLCLAVPDKTVRWCAVSEHEATKCQSFRDHMKSVIPSDGPSVACVKKASYLDCIRAIAANEADAVTLDAGLVYDAYLAPNNLKPVVAEFYGSKEDPQTFYYAVAVVKKDSGFQMNQLRGKKSCHTGLGRSAGWNIPIGLLYCDLPEPRKPLEKAVANFFSGSCAPCADGTDFPQLCQLCPGCGCSTLNQYFGYSGAFKCLKDGAGDVAFVKHSTIFENLANKADRDQYELLCLDNTRKPVDEYKDCHLAQVPSHTVVARSMGGKEDLIWELLNQAQEHFGKDKSKEFQLFSSPHGKDLLFKDSAHGFLKVPPRMDAKMYLGYEYVTAIRNLREGTCPEAPTDECKPVKWCALSHHERLKCDEWSVNSVGKIECVSAETTEDCIAKIMNGEADAMSLDGGFVYIAGKCGLVPVLAENYNKSDNCEDTPEAGYFAVAVVKKSASDLTWDNLKGKKSCHTAVGRTAGWNIPMGLLYNKINHCRFDEFFSEGCAPGSKKDSSLCKLCMGSGLNLCEPNNKEGYYGYTGAFRCLVEKGDVAFVKHQTVPQNTGGKNPDPWAKNLNEKDYELLCLDGTRKPVEEYANCHLARAPNHAVVTRKDKEACVHKILRQQQHLFGSNVTDCSGNFCLFRSETKDLLFRDDTVCLAKLHDRNTYEKYLGEEYVKAVGNLRKCSTSSLLEACTFRRPXNLRGRAATKVKMGTQMIHEFALVSLAQVVCANHVCLHSSVLPCVLNKK

SEQ ID NO: 1574 - protein, 2791 aa, Homo Sapiens
  misc_feature (2769)..(2769): Xaa can be any naturally occurring amino acid
MALVLEIFTLLASICWVSANIFEYQVDAQPLRPCELQRETAFLKQADYVPQCAEDGSFQTVQCQNDGRSCWCVGANGSEVLGSRQPGRPVACLSFCQLQKQQILLSGYINSTDTSYLPQCQDSGDYAPVQCDVQQVQCWCVDAEGMEVYGTRQLGRPKRCPRSCEIRNRRLLHGVGDKSPPQCSAEGEFMPVQCKFVNTTDMMIFDLVHSYNRFPDAFVTFSSFQRRFPEVSGYCHCADSQGRELAETGLELLLDEIYDTIFAGLDLPSTFTETTLYRILQRRFLAVQSVISGRFRCPTKCEVERFTATSFGHPYVPSCRRNGDYQAVQCQTEGPCWCVDAQGKEMHGTRQQGEPPSCAEGQSCASERQQALSRLYFGTSGYFSQHDLFSSPEKRWASPRVARFATSCPPTIKELFVDSGLLRPMVEGQSQQFSVSENLLKEAIRAIFPSRGLARLALQFTTNPKRLQQNLFGGKFLVNVGQFNLSGALGTRGTFNFSQFFQQLGLASFLNGGRQEDLAKPLSVGLDSNSSTGTPEAAKKDGTMNKPTVGSFGFEINLQENQNALKFLASLLELPEFLLFLQHAISVPEDVARDLGDVMETVLSSQTCEQTPERLFVPSCTTEGSYEDVQCFSGECWCVNSWGKELPGSRVRGGQPRCPTDCEKQRARMQSLMGSQPAGSTLFVPACTSEGHFLPVQCFNSECYCVDAEGQAIPGTRSAIGKPKKCPTPCQLQSEQAFLRTVQALLSNSSMLPTLSDTYIPQCSTDGQWRQVQCNGPPEQVFELYQRWEAQNKGQDLTPAKLLVKIMSYREAASGNFSLFIQSLYEAGQQDVFPVLSQYPSLQDVPLAALEGKRPQPRENILLEPYLFWQILNGQLSQYPGSYSDFSTPLAHFDLRNCWCVDEAGQELEGMRSEPSKLPTCPGSCEEAKLRVLQFIRETEEIVSASNSSRFPLGESFLVAKGIRLRNEDLGLPPLFPPREAFAEQFLRGSDYAIRLAAQSTLSFYQRRRFSPDDSAGASALLRSGPYMPQCDAFGSWEPVQCHAGTGHCWCVDEKGGFIPGSLTARSLQIPQCPTTCEKSRTSGLLSSWKQARSQENPSPKDLFVPACLETGEYARLQASGAGTWCVDPASGEELRPGSSSSAQCPSLCNVLKSGVLSRRVSPGYVPACRAEDGGFSPVQCDQAQGSCWCVMDSGEEVPGTRVTGGQPACESPRCPLPFNASEVVGGTILCETISGPTGSAMQQCQLLCRQGSWSVFPPGPLICSLESGRWESQLPQPRACQRPQLWQTIQTQGHFQLQLPPGKMCSADYADLLQTFQVFILDELTARGFCQIQVKTFGTLVSIPVCNNSSVQVGCLTRERLGVNVTWKSRLEDIPVASLPDLHDIERALVGKDLLGRFTDLIQSGSFQLHLDSKTFPAETIRFLQGDHFGTSPRTWFGCSEGFYQVLTSEASQDGLGCVKCPEGSYSQDEECIPCPVGFYQEQAGSLACVPCPVGRTTISAGAFSQTHCVTDCQRNEAGLQCDQNGQYRASQKDRGSGKAFCVDGEGRRLPWWETEAPLEDSQCLMMQKFEKVPESKVIFDANAPVAVRSKVPDSEFPVMQCLTDCTEDEACSFFTVSTTEPEISCDFYAWTSDNVACMTSDQKRDALGNSKATSFGSLRCQVKVRSHGQDSPAVYLKKGQGSTTTLQKRFEPTGFQNMLSGLYNPIVFSASGANLTDAHLFCLLACDRDLCCDGFVLTQVQGGAIICGLLSSPSVLLCNVKDWMDPSEAWANATCPGVTYDQESHQVILRLGDQEFIKSLTPLEGTQDTFTNFQQVYLWKDSDMGSRPESMGCRKDTVPRPASPTEAGLTTELFSPVDLNQVIVNGNQSLSSQKHWLFKHLFSAQQANLWCLSRCVQEHSFCQLAEITESASLYFTCTLYPEAQVCDDIMESNAQGCRLILPQMPKALFRKKVILEDKVKNFYTRLPFQKLMGISIRNKVPMSEKSISNGFFECERRCDADPCCTGFGFLNVSQLKGGEVTCLTLNSLGIQMCSEENGGAWRILDCGSPDIEVHTYPFGWYQKPIAQNNAPSFCPLVVLPSLTEKVSLDSWQSLALSSVVVDPSIRHFDVAHVSTAATSNFSAVRDLCLSECSQHEACLITTLQTQPGAVRCMFYADTQSCTHSLQGQNCRLLLREEATHIYRKPGISLLSYEASVPSVPISTHGRLLGRSQAIQVGTSWKQVDQFLGVPYAAPPLAERRFQAPEPLNWTGSWDASKPRASCWQPGTRTSTSPGVSEDCLYLNVFIPQNVAPNASVLVFFHNTMDREESEGWPAIDGSFLAAVGNLIVVTASYRVGVFGFLSSGSGEVSGNWGLLDQVAALTWVQTHIRGFGGDPRRVSLAADRGGADVASIHLLTARATNSQLFRRAVLMGGSALSPAAVISHERAQQQAIALAKEVSCPMSSSQEVVSCLRQKPANVLNDAQTKLLAVSGPFHYWGPVIDGHFLREPPARALKRSLWVEVDLLIGSSQDDGLINRAKAVKQFEESRGRTSSKTAFYQALQNSLGGEDSDARVEAAATWYYSLEHSTDDYASFSRALENATRDYFIICPIIDMASAWAKRARGNVFMYHAPENYGHGSLELLADVQFALGLPFYPAYEGQFSLEEKSLSLKIMQYFSHFIRSGNPNYPYEFSRKVPTFATPWPDFVPRAGGENYKEFSELLPNRQGLKKADCSFWSKYISSLKTSADGAKGGQSAESEEEELTAGSGLREDLLSLQEPGSKTYSKXPALELPKNLTRGCPLWSSFSLK

SEQ ID NO: 1575 - protein, 1175 aa, Homo Sapiens
  misc_feature (1171)..(1171): Xaa can be any naturally occurring amino acid
MGLAWGLGVLFLMHVCGTNRIPESGGDNSVFDIFELTGAARKGSGRRLVKGPDPSSPAFRIEDANLIPPVPDDKFQDLVDAVRAEKGFLLLASLRQMKKTRGTLLALERKDHSGQVFSVVSNGKAGTLDLSLTVQGKQHVVSVEEALLATGQWKSITLFVQEDRAQLYIDCEKMENAELDVPIQSVFTRDLASIARLRIAKGGVNDNFQGVLQNVRFVFGTTPEDILRNKGCSSSTSVLLTLDNNVVNGSSPAIRTNYIGHKTKDLQAICGISCDELSSMVLELRGLRTIVTTLQDSIRKVTEENKELANELRRPPLCYHNGVQYRNNEEWTVDSCTECHCQNSVTICKKVSCPIMPCSNATVPDGECCPRCWPSDSADDGWSPWSEWTSCSTSCGNGIQQRGRSCDSLNNRCEGSSVQTRTCHIQECDKRFKQDGGWSHWSPWSSCSVTCGDGVITRIRLCNSPSPQMNGKPCEGEARETKACKKDACPINGGWGPWSPWDICSVTCGGGVQKRSRLCNNPTPQFGGKDCVGDVTENQICNKQDCPIDGCLSNPCFAGVKCTSYPDGSWKCGACPPGYSGNGIQCTDVDECKEVPDACFNHNGEHRCENTDPGYNCLPCPPRFTGSQPFGQGVEHATANKQVCKPRNPCTDGTHDCNKNAKCNYLGHYSDPMYRCECKPGYAGNGIICGEDTDLDGWPNENLVCVANATYHCKKDNCPNLPNSGQEDYDKDGIGDACDDDDDNDKIPDDRDNCPFHYNPAQYDYDRDDVGDRCDNCPYNHNPDQADTDNNGEGDACAADIDGDGILNERDNCQYVYNVDQRDTDMDGVGDQCDNCPLEHNPDQLDSDSDRIGDTCDNNQDIDEDGHQNNLDNCPYVPNANQADHDKDGKGDACDHDDDNDGIPDDKDNCRLVPNPDQKDSDGDGRGDACKDDFDHDSVPDIDDICPENVDISETDFRRFQMIPLDPKGTSQNDPNWVVRHQGKELVQTVNCDPGLAVGYDEFNAVDFSGTFFINTERDDDYAGFVFGYQSSSRFYVVMWKQVTQSYWDTNPTRAQGYSGLSVKVVNSTTGPGEHLRNALWHTGNTPGQVRTLWHDPRHIGWKDFTAYRWRLSHRPKTGFIRVVMYEGKKIMADSGPIYDKTYAGGRLGLFVFSQEMVFFSDLKYECRDPXSSNC

SEQ ID NO: 1576 - protein, 974 aa, Homo Sapiens
  misc_feature (962)..(962): Xaa can be any naturally occurring amino acid
MLAPRGAAVLLLHLVLQRWLAAGAQATPQVFDLLPSSSQRLNPGALLPVLTDPALNDLYVISTFKLQTKSSATIFGLYSSTDNSKYFEFTVMGRLNKAILRYLKNDGKVHLVVFNNLQLADGRRHRILLRLSNLQRGAGSLELYLDCIQVDSVHNLPRAFAGPSQKPETIELRTFQRKPQDFLEELKLVVRGSLFQVASLQDCFLQQSEPLAATGTGDFNRQFLGQMTQLNQLLGEVKDLLRQQVKETSFLRNTIAECQACGPLKFQSPTPSTVVPPAPPAPPTRPPRRCDSNPCFRGVQCTDSRDGFQCGPCPEGYTGNGITCIDVDECKYHPCYPGVHCINLSPGFRCDACPVGFTGPMVQGVGISFAKSNKQVCTDIDECRNGACVPNSICVNTLGSYRCGPCKPGYTGDQIRGCKAERNCRNPELNPCSVNAQCIEERQGDVTCVCGVGWAGDGYICGKDVDIDSYPDEELPCSARNCKKDNCKYVPNSGQEDADRDGIGDACDEDADGDGILNEQDNCVLIHNVDQRNSDKDIFGDACDNCLSVLNNDQKDTDGDGRGDACDDDMDGDGIKNILDNCPKFPNRDQRDKDGDGVGDACDSCPDVSNPNQSDVDNDLVGDSCDTNQDSDGDGHQDSTDNCPTVINSAQLDTDKDGIGDECDDDDDNDGIPDLVPPGPDNCRLVPNPAQEDSNSDGVGDICESDFDQDQVIDRIDVCPENAEVTLTDFRAYQTVVLDPEGDAQIDPNWVVLNQGMEIVQTMNSDPGLAVGYTAFNGVDFEGTFHVNTQTDDDYAGFIFGYQDSSSFYVVMWKQTEQTYWQATPFRAVAEPGIQLKAVKSKTGPGEHLRNSLWHTGDTSDQVRLLWKDSRNVGWKDKVSYRWFLQHRPQVGYIRVRFYEGSELVADSGVTIDTTMRGGRLGVFCFSQENIIWSNLKYRCNDTIPEDFQEFQTQNFDRFDNXTKEAICNCFSEH

SEQ ID NO: 1577 - protein, 410 aa, Homo Sapiens
  misc_feature (354)..(354): Xaa can be any naturally occurring amino acid
MELTELLLVVMLLLTARLTLSSPAPPACDLRVLSKLLRDSHVLHSRLSQCPEVHPLPTPVLLPAVDFSLGEWKTQMEETKAQDILGAVTLLLEGVMAARGQLGPTCLSSLLGQLSGQVRLLLGALQSLLGTQLPPQGRTTAHKDPNAIFLSFQHLLRGKVRFLMLVGGSTLCVRRAPPTTAVPSRTSLVLTLNELPNRTSGLLETNFTASARTTGSGLLKWQQGFRAKIPGLLNQTSRSLDQIPGYLNRIHELLNGTRGLFPGPSRRTLGAPDISSGTSDTGSLPPNLQPGYSPSPTHPPTGQYTLFPLPPTLPTPVVQLHPLLPDPSAPTPTPTSPLLNTSYTHSQNLSQEGXGSQTLPTSALSRVQLPSLQGAPGRQLDKISYFLLKPKALVKGIHRTEKGIIFHCTL

SEQ ID NO: 1578 - protein, 234 aa, Homo Sapiens
  misc_feature (208)..(208): Xaa can be any naturally occurring amino acid
MAPFEPLASGILLLLWLIAPSRACTCVPPHPQTAFCNSDLVIRAKFVGTPEVNQTTLYQRYEIKMTKMYKGFQALGDAADIRFVYTPAMESVCGYFHRSHNRSEEFLIAGKLQDGLLHITTCSFVAPWNSLSLAQRRGFTKTYTVGCEECTVFPCLSIPCKLQSGTHCLWTDQLLQGSEKGFQSRHLACLPREPGLCTWQSLRSQIAXILPGVEAEACTVSTLFPLPSFFRTMK

SEQ ID NO: 1579 - protein, 337 aa, Homo Sapiens
  misc_feature (221)..(221): Xaa can be any naturally occurring amino acid
MGAAARTLRLALGLLLLATLLRPADACSCSPVHPQQAFCNADVVIRAKAVSEKEVDSGNDIYGNPIKRIQYEIKQIKMFKGPEKDIEFIYTAPSSAVCGVSLDVGGKKEYLIAGKAEGDGKMHITLCDFIVPWDTLSTTQKKSLNHRYQMGCECKITRCPMIPCYISSPDECLWMDWVTEKNINGHQAKFFACIKRSDGSCAWYRGAAPPKQEFLDIEDPXAGLQRPCGQLQKKPPRVSTGPALTSLPGNSMNKTLIPWVQINMILLPPSPFRHGCGSGGRRGSKVLIPSSLCQALCVWGFDPWVQAGLGHAASLPVPALAPSQMPSRQHLGISQLG

SEQ ID NO: 1580 - protein, 277 aa, Homo Sapiens
  misc_feature (234)..(234): Xaa can be any naturally occurring amino acid
MSTESMIRDVELAEEALPKKTGGPQGSRRCLFLSLFSFLIVAGATTLFCLLHFGVIGPQREEFPRDLSLISPLAQAVRSSSRTPSDKPVAHVVANPQAEGQLQWLNRRANALLANGVELRDNQLVVPSEGLYLIYSQVLFKGQGCPSTHVLLTHTISRIAVSYQTKVNLLSAIKSPCQRETPEGAEAKPWYEPIYLGGVFQLEKGDRLSAEINRPDYLDFAESGQVYFGIIALXGGRTSNLPKRLPCPNPFITPSFRHPQPLLAQKENWGLRVGTQA

SEQ ID NO: 1581 - protein, 529 aa, Homo Sapiens
  misc_feature (456)..(456): Xaa can be any naturally occurring amino acid
MGLSTVPDLLLPLVLLELLVGIYPSGVIGLVPHLGDREKRDSVCPQGKYIHPQNNSICCTKCHKGTYLYNDCPGPGQDTDCRECESGSFTASENHLRHCLSCSKCRKEMGQVEISSCTVDRDTVCGCRKNQYRHYWSENLFQCFNCSLCLNGTVHLSCQEKQNTVCTCHAGFFLRENECVSCSNCKKSLECTKLCLPQIENVKGTEDSGTTVLLPLVIFFGLCLLSLLFIGLMYRYQRWKSKLYSIVCGKSTPEKEGELEGTTTKPLAPNPSFSPTPGFTPTLGFSPVPSSTFTSSSTYTPGDCPNFAAPRREVAPPYQGADPILATALASDPIPNPLQKWEDSAHKPQSLDTDDPATLYAVVENVPPLRWKEFVRRLGLSDHEIDRLELQNGRCLREAQYSMLATWRRRTPRREATLELLGRVLRDMDLLGCLEDIEEALCGPAALPPAPSLLRXGCAPAGSSKDRPARSPSNPTFFWKGGVLQGQAGASSRLLGANPSMYIAFLSCLRAADSQRCARGERCAVGSRA

SEQ ID NO: 1582 - protein, 496 aa, Homo Sapiens
  misc_feature (462)..(462): Xaa can be any naturally occurring amino acid
MAPVAVWAALAVGLELWAAAHALPAQVAFTPYAPEPGSTCRLREYYDQTAQMCCSKCSPGQHAKVFCTKTSDTVCDSCEDSTYTQLWNWVPECLSCGSRCSSDQVETQACTREQNRICTCRPGWYCALSKQEGCRLCAPLRKCRPGFGVARPGTETSDVVCKPCAPGTFSNTTSSTDICRPHQICNVVAIPGNASMDAVCTSTSPTRSMAPGAVHLPQPVSTRSQHTQPTPEPSTAPSTSFLLPMGPSPPAEGSTGDFALPVGLIVGVTALGLLIIGVVNCVIMTQVKKKPLCLQREAKVPHLPADKARGTQGPEQQHLLITAPSSSSSSLESSASALDRRAPTRNQPQAPGVEASGAGEARASTGSSDSSPGGHGTQVNVTCIVNVCSSSDHSSQCSSQASSTMGDTDSSPSESPKDEQVPFSKEECAFRSQLETPETLLGSTEEKPLPLGVPDAGMKPSXPGRCGLCRSQGGLSPGRMTLRRGPGPSRPPPLGL

SEQ ID NO: 1583 - protein, 335 aa, Homo Sapiens
  misc_feature (318)..(318): Xaa can be any naturally occurring amino acid
MRRASRDYTKYLRGSEEMGGGPGAPHEGPLHAPPPPAPHQPPAASRSMFVALLGLGLGQVVCSVALFFYFRAQMDPNRISEDGTHCIYRILRLHENADFQDTTLESQDTKLIPDSCRRIKQAFQGAVQKELQHIVGSQHIRAEKAMVDGSWLDLAKRSKLEAQPFAHLTINATDIPSGSHKVSLSSWYHDRGWAKISNMTFSNGKLIVNQDGFYYLYANICFRHHETSGDLATEYLQLMVYVTKTSIKIPSSHTLMKGGSTKYWSGNSEFHFYSINVGGFFKLRSGEEISIEVSNPSLLDPDQDATYFGAFKVRDIDXAPVFGVLCISWMFGNIF

SEQ ID NO: 1584 - protein, 262 aa, Homo Sapiens
  misc_feature (245)..(245): Xaa can be any naturally occurring amino acid
MDPNRISEDGTHCIYRILRLHENADFQDTTLESQDTKLIPDSCRRIKQAFQGAVQKELQHIVGSQHIRAEKAMVDGSWLDLAKRSKLEAQPFAHLTINATDIPSGSHKVSLSSWYHDRGWAKISNMTFSNGKLIVNQDGFYYLYANICFRHHETSGDLATEYLQLMVYVTKTSIKIPSSHTLMKGGSTKYWSGNSEFHFYSINVGGFFKLRSGEEISIEVSNPSLLDPDQDATYFGAFKVRDIDXAPVFGVLCISWMFGNIF

SEQ ID NO: 1585 - protein, 274 aa, Homo Sapiens
  misc_feature (235)..(235): Xaa can be any naturally occurring amino acid
MDPGLQQALNGMAPPGDTAMHVPAGSVASHLGTTSRSYFYLTTATLALCLVFTVATIMVLVVQRTDSIPNSPDNVPLKGGNCSEDLLCILKRAPFKKSWAYLQVAKHLNKTKLSWNKDGILHGVRYQDGNLVIQFPGLYFIICQLQFLVQCPNNSVDLKLELLINKHIKKQALVTVCESGMQTKHVYQNLSQFLLDYLQVNTTISVNVDTFQYIDTSTFPLENVLSIFLYSNSDXTVSLGLQEESASLPYSISSLQTLGQKENFRPRQTTQGIK

SEQ ID NO: 1586 - protein, 402 aa, Homo Sapiens
  misc_feature (394)..(394): Xaa can be any naturally occurring amino acid
MEEPQSDPSVEPPLSQETFSDLWKLLPENNVLSPLPSQAMDDLMLSPDDIEQWFTEDPGPDEAPRMPEAAPPVAPAPAAPTPAAPAPAPSWPLSSSVPSQKTYQGSYGFRLGFLHSGTAKSVTCTYSPALNKMFCQLAKTCPVQLWVDSTPPPGTRVRAMAIYKQSQHMTEVVRRCPHHERCSDSDGLAPPQHLIRVEGNLRVEYLDDRNTFRHSVVVPYEPPEVGSDCTTIHYNYMCNSSCMGGMNRRPILTIITLEDSSGNLLGRNSFEVRVCACPGRDRRTEEENLRKKGEPHHELPPGSTKRALPNNTSSSPQPKKKPLDGEYFTLQIRGRERFEMFRELNEALELKDAQAGKEPGGSRAHSSHLKSKKGQSTSRHKKLMFKTEGPDSDXHSPLLVPH

SEQ ID NO: 1587 - protein, 612 aa, Homo Sapiens
  misc_feature (582)..(582): Xaa can be any naturally occurring amino acid
MAVAGAVSGEPLVHWCTQQLRKTFGLDVSEEIIQYVLSIESAEEIREYVTDLLQGNEGKKGQFIEELITKWQKNDQELISDPLQQCFKKDEILDGQKSGDHLKRGRKKGRNRQEVPAFTEPDTTAEVKTPFDLAKAQENSNSVKKKTKFVNLYTREGQDRLAVLLPGRHPCDCLGQKHKLINNCLICGRIVCEQEGSGPCLFCGTLVCTHEEQDILQRDSNKSQKLLKKLMSGVENSGKVDISTKDLLPHQELRIKSGLEKAIKHKDKLLEFDRTSIRRTQVIDDESDYFASDSNQWLSKLERETLQKREEELRELRHASRLSKKVTIDFAGRKILEEENSLAEYHSRLDETIQAIANGTLNQPLTKLDRSSEEPLGVLVNPNMYQSPPQWVDHTGAASQKKAFRSSGFGLEFNSFQHQLRIQDQEFQEGFDGGWCLSVHQPWASLLVRGIKRVEGRSWYTPHRGRLWIAATAKKPSPQEVSELQATYRLLRGKDVEFPNDYPSGCLLGCVDLIDCLSQKQFKEQFPDISQESDSPFVFICKNPQEMVVKFPIKGNPKIWKLDSKIHQGAKKGLMKQNKAVXPRRKGTIQHSGVLCTKIAIYWSFGIEVVET

SEQ ID NO: 1588 - protein, 164 aa, Homo Sapiens
  misc_feature (148)..(148): Xaa can be any naturally occurring amino acid
MASHRLLLLCLAGLVFVSEAGPTGTGESKCPLMVKVLDAVRGSPAINVAVHVFRKAADDTWEPFASGKTSESGELHGLTTEEEFVEGIYKVEIDTKSYWKALGISPFHEHAEVVFTANDSGPRRYTIAALLSPYSYSTTAVVTNPKEXGTSPPVDLKDEGWDFM

SEQ ID NO: 1589 - protein, 769 aa, Homo Sapiens
  misc_feature (740)..(740): Xaa can be any naturally occurring amino acid
MPGKMVVILGASNILWIMFAASQAFKIETTPESRYLAQIGDSVSLTCSTTGCESPFFSWRTQIDSPLNGKVTNEGTTSTLTMNPVSFGNEHSYLCTATCESRKLEKGIQVEIYSFPKDPEIHLSGPLEAGKPITVKCSVADVYPFDRLEIDLLKGDHLMKSQEFLEDADRKSLETKSLEVTFTPVIEDIGKVLVCRAKLHIDEMDSVPTVRQAVKELQVYISPKNTVISVNPSTKLQEGGSVTMTCSSEGLPAPEIFWSKKLDNGNLQHLSGNATLTLIAMRMEDSGIYVCEGVNLIGKNRKEVELIVQEKPFTVEISPGPRIAAQIGDSVMLTCSVMGCESPSFSWRTQIDSPLSGKVRSEGTNSTLTLSPVSFENEHSYLCTVTCGHKKLEKGIQVELYSFPRDPEIEMSGGLVNGSSVTVSCKVPSVYPLDRLEIELLKGETILENIEFLEDTDMKSLENKSLEMTFIPTIEDTGKALVCQAKLHIDDMEFEPKQRQSTQTLYVNVAPRDTTVLVSPSSILEEGSSVNMTCLSQGFPAPKILWSRQLPNGELQPLSENATLTLISTKMEDSGVYLCEGINQAGRSRKEVELIIQVTPKDIKLTAFPSESVKEGDTVIISCTCGNVPETWIILKKKAETGDTVLKSIDGAYTIRKAQLKDAGVYECESKNKVGSQLRSLTLDVQGRENNKDYFSPELLVLYFASSLIIPAIGMIIYFARKANMKGSYSLVEAQKSKVXLMLDMFNWRHYLSVQILDTAHHSLRKTMS

SEQ ID NO: 1590 - protein, 677 aa, Homo Sapiens
  misc_feature (648)..(648): Xaa can be any naturally occurring amino acid
MPGKMVVILGASNILWIMFAASQAFKIETTPESRYLAQIGDSVSLTCSTTGCESPFFSWRTQIDSPLNGKVTNEGTTSTLTMNPVSFGNEHSYLCTATCESRKLEKGIQVEIYSFPKDPEIHLSGPLEAGKPITVKCSVADVYPFDRLEIDLLKGDHLMKSQEFLEDADRKSLETKSLEVTFTPVIEDIGKVLVCRAKLHIDEMDSVPTVRQAVKELQVYISPKNTVISVNPSTKLQEGGSVTMTCSSEGLPAPEIFWSKKLDNGNLQHLSGNATLTLIAMRMEDSGIYVCEGVNLIGKNRKEVELIVQAFPRDPEIEMSGGLVNGSSVTVSCKVPSVYPLDRLEIELLKGETILENIEFLEDTDMKSLENKSLEMTFIPTIEDTGKALVCQAKLHIDDMEFEPKQRQSTQTLYVNVAPRDTTVLVSPSSILEEGSSVNMTCLSQGFPAPKILWSRQLPNGELQPLSENATLTLISTKMEDSGVYLCEGINQAGRSRKEVELIIQVTPKDIKLTAFPSESVKEGDTVIISCTCGNVPETWIILKKKAETGDTVLKSIDGAYTIRKAQLKDAGVYECESKNKVGSQLRSLTLDVQGRENNKDYFSPELLVLYFASSLIIPAIGMIIYFARKANMKGSYSLVEAQKSKVXLMLDMFNWRHYLSVQILDTAHHSLRKTMS

SEQ ID NO: 1591 - protein, 393 aa, Homo Sapiens
  misc_feature (372)..(372): Xaa can be any naturally occurring amino acid
MTDRQTDTAPSPSYHLLPGRRRTVDAAASRGQGPEPAPGGGVEGVGARGVALKLFVQLLGCSRFGGAVVRAGEAEPSGAARSASSGREEPQPEEGEEEEEKEEERGPQWRLGARKPGSWTGEAAVCADSAPAARAPQALARASGRGGRVARRGAEESGPPHSPSRRGSASRAGPGRASETMNFLLSWVHWSLALLLYLHHAKWSQAAPMAEGGGQNHHEVVKFMDVYQRSYCHPIETLVDIFQEYPDEIEYIFKPSCVPLMRCGGCCNDEGLECVPTEESNITMQIMRIKPHQGQHIGEMSFLQHNKCECRPKKDRARQENPCGPCSERRKHLFVQDPQTCKCSCKNTDSRCKARQLELNERTCRCDKPRRXAGQEEGASLRVSGTRSLTRKD

SEQ ID NO: 1592 - protein, 489 aa, Homo Sapiens
  misc_feature (479)..(479): Xaa can be any naturally occurring amino acid
MAPLRPLLILALLAWVALADQESCKGRCTEGFNVDKKCQCDELCSYYQSCCTDYTAECKPQVTRGDVFTMPEDEYTVYDDGEEKNNATVHEQVGGPSLTSDLQAQSKGNPEQTPVLKPEEEAPAPEVGASKPEGIDSRPETLHPGRPQPPAEEELCSGKPFDAFTDLKNGSLFAFRGQYCYELDEKAVRPGYPKLIRDVWGIEGPIDAAFTRINCQGKTYLFKGSQYWRFEDGVLDPDYPRNISDGFDGIPDNVDAALALPAHSYSGRERVYFFKGKQYWEYQFQHQPSQEECEGSSLSAVFEHFAMMQRDSWEDIFELLFWGRTSAGTRQPQFISRDWHGVPGQVDAAMAGRIYISGMAPRPSLAKKQRFRHRNRKGYRSQRGHSRGRNQNSRRPSRATWLSLFSSEESNLGANNYDDYRMDWLVPATCEPIQSVFFFSGDKYYRVNLRTRRVDTVDPPYPRSIAQYWLGCPAPGHLXESEPTWPGPL

SEQ ID NO: 1593 - protein, 664 aa, Homo Sapiens
  misc_feature (647)..(647): Xaa can be any naturally occurring amino acid
MSFLSRQQPPPPRRAGAACTLRQKLIFSPCSDCEEEEEEEEEEGSGHSTGEDSAFQEPDSPLPPARSPTEPGPERRRSPGPAPGSPGELEEDLLLPGACPGADEAGGGAEGDSWEEEGFGSSSPVKSPAAPYFLGSSFSPVRCGGPGDASPRGCGARRAGEGRRSPRPDHPGTPPHKTFRKLRLFDTPHTPKSLLSKARGIDSSSVKLRGSSLFMDTEKSGKREFDVRQTPQVNINPFTPDSLLLHSSGQCRRRKRTYWNDSCGEDMEASDYELEDETRPAKRITITESNMKSRYTTEFHELEKIGSGEFGSVFKCVKRLDGCIYAIKRSKKPLAGSVDEQNALREVYAHAVLGQHSHVVRYFSAWAEDDHMLIQNEYCNGGSLADAISENYRIMSYFKEAELKDLLLQVGRGLRYIHSMSLVHMDIKPSNIFISRTSIPNAASEEGDEDDWASNKVMFKIGDLGHVTRISSPQVEEGDSRFLANEVLQENYTHLPKADIFALALTVVCAAGAEPLPRNGDQWHEIRQGRLPRIPQVLSQEFTELLKVMIHPDPERRPSAMALVKHSVLLSASRKSAEQLRIELNAEKFKNSLLQKELKKAQMAKAAAEERALFTDRMATRSTTQSNRTSRLIGKKMNRSVSLTIYXATPFPPPPEHCDKRKLG

SEQ ID NO: 1594 - protein, 163 aa, Homo Sapiens
  misc_feature (125)..(125): Xaa can be any naturally occurring amino acid
MPACRLGPLAAALLLSLLLFGFTLVSGTGAEKTGVCPELQADQNCTQECVSDSECADNLKCCSAGCATFCSLPNDKEGSCPQVNINFPQLGLCRDQCQVDSQCPGQMKCCRNGCGKVSCVTPNFXAPATTRLSSEERKFLPGPASGSSPPALPFFGTLYSLLG

SEQ ID NO: 1595 - protein, 980 aa, Homo Sapiens
  misc_feature (941)..(941): Xaa can be any naturally occurring amino acid
MARKRAAGGEPRGRELRSQKSKAKSKARREEEEEDAFEDEKPPKKSLLSKVSQGKRKRGCSHPGGSADGPAKKKVAKVTVKSENLKVIKDEALSDGDDLRDFPSDLKKAHHLKRGATMNEDSNEEEEESENDWEEVEELSEPVLGDVRESTAFSRSLLPVKPVEIEIETPEQAKTRERSEKIKLEFETYLRRAMKRFNKGVHEDTHKVHLLCLLANGFYRNNICSQPDLHAIGLSIIPARFTRVLPRDVDTYYLSNLVKWFIGTFTVNAELSASEQDNLQTTLERRFAIYSARDDEELVHIFLLILRALQLLTRLVLSLQPIPLKSATAKGKKPSKERLTADPGGSSETSSQVLENHTKPKTSKGTKQEETFAKGTCRPSAKGKRNKGGRKKRSKPSSSEEDEGPGDKQEKATQRRPHGRERRVASRVSYKEESGSDEAGSGSDFELSSGEASDPSDEDSEPGPPKQRKAPAPQRTKAGSKSASRTHRGSHRKDPSLPAASSSSSSSKRGKKMCSDGEKAEKRSIAGIDQWLEVFCEQEEKWVCVDCVHGVVGQPLTCYKYATKPMTYVVGIDSDGWVRDVTQRYDPVWMTVTRKCRVDAEWWAETLRPYQSPFMDREKKEDLEFQAKHMDQPLPTAIGLYKNHPLYALKRHLLKYEAIYPETAAILGYCRGEAVYSRDCVHTLHSRDTWLKKARVVRLGEVPYKMVKGFSNRARKARLAEPQLREENDLGLFGYWQTEEYQPPVAVDGKVPRNEFGNVYLFLPSMMPIGCVQLNLPNLHRVARKLDIDCVQAITGFDFHGGYSHPVTDGYIVCEEFKDVLLTAWENEQAVIERKEKEKKEKRALGNWKLLAKGLLIRERLKRRYGPKSEAAAPHTDAGGGLSSDEEEGTSSQAEAARILAASWPQNREDEEKQKLKGGPKKTKREKKAAASHLFPFEKLXAERPLEGHPPVAAAPLQAPHLPWACPAPGGGGFSAEKAN

SEQ ID NO: 1596 - protein, 692 aa, Homo Sapiens; identical to SEQ ID NO: 750
  misc_feature (674)..(674): Xaa can be any naturally occurring amino acid

1-46. (canceled)

47. A composition of matter comprising:
a) an isolated polypeptide comprising the sequence located on the C-terminal side of the X residue in any one of SEQ ID NOs: 1 to 1596, or of an epitope-containing fragment thereof;
b) an isolated polypeptide comprising the sequence located on the C-terminal side of the X residue in any one of SEQ ID NOs: 1 to 1596, or of an epitope-containing fragment thereof, said polypeptide having a length of 3 to 100 amino acids;
c) an isolated polynucleotide encoding a polypeptide according to (a) or (b);
d) an isolated polynucleotide comprising a first nucleotide sequence encoding a polypeptide comprising a Post STOP Peptide (PSP) sequence as contained in any one of SEQ ID NOs: 1-1596 or a sequence complementary thereto and a second nucleotide sequence of 100 or less nucleotides in length, wherein said second nucleotide sequence is adjacent to said first nucleotide sequence in a naturally occurring nucleic acid;
e) an isolated antibody or portion of an antibody which specifically binds to a polypeptide comprising a PSP sequence as contained in anyone of SEQ ID NOs: 1-1596; or
f) an isolated cell which specifically binds to a polypeptide comprising a PSP sequence as contained in anyone of SEQ ID NOs: 1-1596.

48. The composition of matter according to claim 47, wherein said isolated cell is an immune cell comprising a TCR specific for a polypeptide comprising PSP sequence as contained in any one of SEQ ID NOs: 1-1596.

49. The composition of matter according to claim 48, wherein said composition of matter is a solid support comprising an isolated nucleic acid which specifically binds to a polynucleotide encoding a polypeptide comprising a PSP sequence as contained in any one of SEQ ID NOs: 1-1596 or to a sequence complementary thereto.

50. The composition of matter according to claim 48, wherein said composition of matter is a solid support comprising an antibody or portion of an antibody which specifically binds to a polypeptide comprising a PSP sequence as contained in any one of SEQ ID NOs: 1-1596.

51. The composition of matter according to claim 48, wherein said composition of matter is a solid support comprising a polypeptide comprising a PSP sequence as contained in any one of SEQ ID NOs: 1-1596.

52. A method of determining whether an individual is making one or more polypeptides comprising a PSP sequence as contained in any one of SEQ ID NOs: 1-1596 comprising contacting a sample obtained from said individual with one or more agents indicative of the presence of said one or more polypeptides and determining whether said one or more agents bind to said sample.

53. The method according to claim 52, wherein said one or more agents are:
a) nucleic acids;
b) PCR primers which yield an amplification product only if said sample comprises nucleic acids encoding said one or more polypeptides or nucleic acids complementary to said nucleic acids encoding said one or more polypeptides;
c) antibodies or portions thereof which specifically bind to a polypeptide comprising a PSP sequence as contained in any one of SEQ ID NOs: 1-1596;
d) polypeptides which bind to antibodies in said sample which specifically bind to a polypeptide comprising a PSP sequence as contained in any one of SEQ ID NOs: 1-1596;
e) cells; or
f) immune cells comprising a TCR specific for a polypeptide comprising a PSP sequence as contained in anyone of SEQ ID NOs: 1-1596.

54. A method of determining the level of translation of post-stop peptides occurring in an individual comprising determining whether a sample from said individual comprises one or more post-stop peptides.

55. The method according to claim 54, wherein said method determines is said sample contains:
a) one or more nucleic acids encoding a post-stop peptide;
b) one or more post-stop peptides;
c) one or more antibodies which specifically bind to post-stop peptides; or
d) one or more immune cells comprising TCR molecules that bind to a post-stop peptide.

56. A method of determining whether a post-stop peptide is present in a sample comprising performing a mass spectrometry analysis on said sample and determining whether said sample contains a spectrum indicative of the presence of a post-stop peptide.

57. The method according to claim 56, wherein said post-stop peptide is selected from the group consisting of sequences located on the C-terminal side of the X residue in SEQ ID NOs: 1-1596.

58. The method according to claim 56, wherein said mass spectrometry analysis comprises a tandem mass spectrometry analysis.

59. A method for determining whether a post-stop peptide is differentially expressed in a first population of individuals relative to a second population of individuals comprising:
determining a first level of expression of said post-stop peptide in said first population of individuals;
determining a second level of said post-stop peptide in said second population of individuals; and
comparing said first level of expression and said second level of expression, whereby said post-stop peptide is differentially expressed in said first population of individuals relative to said second population of individuals if there is a statistically significant difference between said first level of expression and said second level of expression.

60. The method according to claim 59, wherein said first population of individuals suffers from a particular disease and said second population does not suffer from said disease.

61. The method according to claim 60, wherein said disease is cancer.

62. The method according to claim 59, wherein said post-stop peptide is selected from the group consisting of sequences located on the C-terminal side of the X residue in SEQ ID NOs: 1-1596.

63. A method of identifying differentially expressed nucleic acids encoding post-stop peptides comprising:
determining a first level of a variant nucleic acid in a first population of individuals, wherein said variant nucleic acid results from a base substitution which converts a stop codon into a codon encoding an amino acid, wherein said base substitution creates a new open reading frame encoding at least 3 amino acids beyond said converted stop codon and wherein said new open reading frame is in frame with an open reading frame preceding said stop codon;
determining a second level of said variant nucleic acid in a second population of individuals; and
comparing said first level of expression and said second level of expression, whereby said variant nucleic acid is differentially expressed in said first population of individuals relative to said second population of individuals if there is a statistically significant difference between said first level of expression and said second level of expression.

64. The method according to claim 63, wherein said first population of individuals suffers from a particular disease and said second population does not suffer from said disease.

65. The method according to claim 64, wherein said disease is cancer.

66. The method according to claim 64, wherein said variant nucleic acid encodes a post-stop peptide selected from the group consisting of sequences located on the C-terminal side of the X residue in SEQ ID NOs: 1-1596.

67. A method for identifying nucleic acids capable of encoding post-stop peptides comprising:
obtaining a plurality of nucleic acid sequences wherein each nucleic acid sequence comprises an open reading frame encoding a polypeptide, said open reading frame terminating with a stop codon; and
identifying those nucleic acids within said plurality of nucleic acid sequences which contain an open reading frame immediately after said stop codon which is in frame with the open reading frame encoding said polypeptide, wherein said open reading frame immediately after said stop codon encodes at least 3 amino acids.

68. The method according to claim 67, further comprising determining whether any of said identified nucleic acids are differentially expressed in a first population of individuals relative to a second population of individuals.

69. The method according to claim 68, wherein said first population of individuals suffers from a particular disease and said second population does not suffer from said disease.

70. The method according to claim 69, wherein said disease is cancer.

71. The method according to claim 67, wherein said plurality of nucleic acid sequences comprise nucleic acid sequences encoding secreted proteins.

72. The method according to claim 67, wherein said plurality of nucleic acid sequences comprise nucleic acid sequences encoding tumor markers.
